(19) United States
(12) Patent Application Publication
(10) Pub. No.: US 2024/0115734 A1
(43) Pub. Date: Apr. 11, 2024

(54) RECOMBINANT AAVS WITH IMPROVED TROPISM AND SPECIFICITY

(71) Applicant: AFFINIA THERAPEUTICS INC., Waltham, MA (US)

(72) Inventors: Christopher TIPPER, Cambridge, MA (US); Lisa STANEX, Natick, MA (US); Keven OLIVIERI, Winchester, MA (US)

(21) Appl. No.: 18/264,919

(22) PCT Filed: Feb. 9, 2022
(86) PCT No.: PCT/US2022/015842

§ 371 Date: Aug. 9, 2023

Related U.S. Application Data
(60) Provisional application No. 63/147,701, filed on Feb. 9, 2021.
(60) Provisional application No. 63/173,998, filed on Apr. 12, 2021.
(60) Provisional application No. 63/186,641, filed on May 10, 2021.
(60) Provisional application No. 63/290,517, filed on Dec. 16, 2021.

(51) Int. Cl. A61K 48/00; A61P 21/00; C07K 14/005; C12N 9/16; C12N 15/86

(52) U.S. Cl. CPC A61K 48/005; A61P 21/00; C07K 14/005; C12N 9/16; C12N 15/86; C12N 2750/14122; C12N 2750/14143; C12N 2750/14145; C12Y 301/03

(57) ABSTRACT

The present disclosure provides a modified AAV capsid protein comprising a targeting peptide, optionally further comprising a liver-toggle mutation. The modified AAV capsid protein can form an rAAV, which has a preferred tropism, specificity or biodistribution in vivo or in vitro. The rAAV of the present disclosure can be used for gene therapies targeted at a specific tissue. The present disclosure also provides rAAV compositions comprising MTM1 coding sequences and their use to treat subjects suffering from X-linked myotubular myopathy (XLMTM).

### 1. CROSS-REFERENCE TO RELATED APPLICATIONS

[0001] This application claims the benefit of U.S. Provisional Application No. 63/147,701, filed Feb. 9, 2021, U.S. Provisional Application No. 63/173,998 filed Apr. 12, 2021, U.S. Provisional Application No. 63/186,641 filed May 10, 2021 and U.S. Provisional Application No. 63/290,517 filed Dec. 16, 2021, which are incorporated by reference in their entireties herein.

### 2. SEQUENCE LISTING

[0002] The instant application contains a Sequence Listing.

### 3. BACKGROUND

[0003] Adeno-associated virus (AAV) has become the vector system of choice for in vivo gene therapy. A growing variety of recombinant AAVs (rAAVs) engineered to deliver therapeutic nucleic acids have been developed and tested in nonhuman primates and humans, and the FDA has recently approved two rAAV gene therapy products for commercialization.

[0004] Although AAV vectors are safer and less inflammatory than other viruses, toxicities have occurred following administration of high doses of rAAVs for gene therapy. Thus, local administration of rAAVs to a target tissue or organ has been used to improve targeting and reduce systemic toxicity. Further, various natural and synthetic AAV variants have been tested to develop an AAV vector with desired tropism and specificity.

[0005] In general, the capsid is thought to be the primary determinant of infectivity and host-vector related properties such as adaptive immune responses, tropism, specificity, potency, and bio-distribution. Indeed, several of these properties are known to vary between natural serotypes and engineered AAV variants. Over the last decade, novel synthetic AAV variants have been developed by using a variety of capsid engineering techniques, one of which is the insertion of small, 7 amino acid-long, peptides into an exposed loop of the capsid protein, called variable region VIII (VRVIII). In some circumstances, the insertion of a novel peptide into a wild type capsid changes the tropism of the variant. For example, insertion of a peptide having the sequence RGDLGLS (SEQ ID NO: 156) into the capsid of AAV9 was found to increase infection of astrocytes (see PhD thesis of Eike Kienle, Ruprecht-Karls-Universitat Heidelberg, 2014) and primary breast cancer cells (Michelfelder et al. (2009)).

[0006] To date, however, there is little understanding as to how these changes on the capsid functionally alter these properties. Additionally, AAV vectors with a desired tropism and specificity to common therapeutic targets, such as muscles, have not yet been available.

[0007] For example, X-linked myotubular myopathy (XLMTM; OMIM 310400) is a fatal monogenic disease of skeletal muscle. XLMTM results from loss-of-function mutations in Myotubularin 1 (MTM1), which encodes one of a family of 3-phosphoinositide phosphatases acting on the second messengers phosphatidylinositol 3-monophosphate [PI(3)P] and phosphatidylinositol 3,5-bisphosphate [PI(3,5)P2] (see, e.g., Miyagoe-Suzuki and Takeda, 2010, Exp Cell Res 316(18):3087-92). Although myotubularin is expressed ubiquitously, loss of this enzyme primarily affects skeletal muscle.

[0008] A recent clinical trial evaluated a recombinant adeno-associated virus (rAAV) as a gene therapy for XLMTM. Unfortunately, the rAAV, which was an rAAV serotype 8 vector carrying the MTM1 gene under the control of the muscle-specific desmin promoter, reported three deaths from the high-dose limb of the trial resulting from liver dysfunction (Mendell et al., 2021, Mol Ther. 29(2):464-488. doi: 10.1016/j.ymthe.2020.12.007. Epub 2020 Dec. 10. PMID: 33309881; PMCID: PMC7854298).

[0009] Thus, there remains a need in the art for gene therapies for muscular disorders, such as XLMTM, with improved safety profiles.

### 4. SUMMARY OF THE INVENTION

[0010] The present disclosure provides a modified AAV capsid protein that can form an rAAV having a preferred tropism and specificity to a therapeutic target. Specifically, a modified AAV capsid protein comprising a targeting peptide, RGDLLLS (SEQ ID NO: 1), in the VR VIII region is provided. The rAAVs containing the modified AAV capsid protein demonstrated better targeting with more specific expression of a transgene in the target tissue, e.g., muscles, when systemically administered to a mammalian subject.

[0011] Additionally, it was demonstrated that the specific targeting of the rAAV can be enhanced by introducing a liver-toggle mutation together with a targeting peptide to the capsid protein. Applicant previously demonstrated that the liver-toggle mutation is associated with liver-on or liver-off tropism. Applicant now reports that the liver-toggle mutation provides synergistic effects to the specific targeting of an rAAV to a target tissue when combined with a targeting peptide.

[0012] The use of AAV for gene therapy for muscular disorders (e.g., XLMTM) has been limited because of liver toxicity. Modified AAV capsid proteins provided herein provide an improved way to treat the diseases with better safety. The modified AAV capsid proteins could deliver a construct encoding a therapeutic gene (e.g., MTM1) with reduced liver tropism and/or improved muscle tropism. Additionally, the construct could drive higher and more specific MTM1 expression at the target by virtue of appropriate expression regulatory elements (ERE) (e.g., promoter sequences) and/or codon optimized coding sequences.

[0013] Accordingly, one aspect of the present disclosure provides a modified adeno-associated virus (AAV) capsid protein, comprising: (i) a reference AAV capsid protein, and (ii) a 7-mer peptide having the sequence RGDLLLS (SEQ ID NO: 1) inserted into a site within VR VIII of the reference AAV capsid protein.

[0014] In some embodiments, the AAV capsid protein is selected from one or more of VP1, VP2 and VP3. In some embodiments, the reference AAV capsid protein is a capsid protein of an AAV variant selected from the group consisting of: AAV2; AAV1; AAV6; AAV3; AAV LK03; AAV7; AAV8; AAV hu.37; AAV rh.10; AAV9; AAV hu.68; AAV10; AAV5; AAV3-3; AAV4-4; AAV1-A; hu.46-A; hu.48-A; hu.44-A; hu.43-A; AAV6-A; hu.34-B; hu.47-B; hu.29-B; rh.63-B; hu.56-B; hu.45-B; rh.57-B; rh.35-B; rh.58-B; rh.28-B; rh.51-B; rh.19-B; rh.49-B; rh.52-B; rh.13-B; AAV2-B; rh.20-B; rh.24-B; rh.64-B; hu.27-B; hu.21-B; hu.22-B; hu.23-B; hu.7-C; hu.61-C; rh.56-C; hu. 9-C; hu.54-C; hu.53-C; hu.60-C; hu.55-C; hu.2-C; hu.1-C; hu.18-C; hu.3-C; hu.25-C; hu.15-C; hu.16-C; hu.11-C; hu.10-C; hu.4-C; rh.54-D; rh.48-D; rh.55-D; rh.62-D; AAV7-D; rh.52-E; rh.51-E; hu.39-E; rh.53-E; hu.37-E; rh.43-E; rh.50-E; rh.49-E; rh.61-E; hu.41-E; rh.64-E; rh74; hu.42-E; rh.57-E; rh.40-E; hu.67-E; hu.17-E; hu.6-E; hu.66-E; rh.38-E; hu.32-F; AAV9/hu; hu.31-F; Anc80; Anc81; Anc82; Anc83; Anc84; Anc94; Anc113; Anc126; Anc127; Anc80L27; Anc80L59; Anc80L60; Anc80L62; Anc80L65; Anc80L33; Anc80L36; Anc80L44; Anc80L1; Anc110; and Anc80DI. In some embodiments, the reference AAV capsid protein is a capsid protein having a sequence selected from SEQ ID Nos: 54-152 or a fragment thereof.

[0015] In some embodiments, the 7-mer peptide is inserted into an amino acid position between 565 and 595 of the reference AAV capsid protein. In some embodiments, (i) the reference AAV capsid protein is a capsid protein of AAV1 and the 7-mer peptide is inserted between D590 and P591 or between S588 and T589 of the capsid protein; (ii) the reference AAV capsid protein is a capsid protein of AAV2 and the 7-mer peptide is inserted between R588 and Q589 or between N587 and R588 of the capsid protein; (iii) the reference AAV capsid protein is a capsid protein of AAV3b and the 7-mer peptide is inserted between S586 and S587 or between N588 and T589 of the capsid protein; (iv) the reference AAV capsid protein is a capsid protein of AAV4 and the 7-mer peptide is inserted between S584 and N585 or between S586 and N587 of the capsid protein; (v) the reference AAV capsid protein is a capsid protein of AAV5 and the 7-mer peptide is inserted between S575 and S576 or between T577 and T578 of the capsid protein; (vi) the reference AAV capsid protein is a capsid protein of AAV6 and the 7-mer peptide is inserted between D590 and P591 or S588 and T589 of the capsid protein; (vii) the reference AAV capsid protein is a capsid protein of AAV7 and the 7-mer peptide is inserted between N589 and T590 of the capsid protein; (viii) the reference AAV capsid protein is a capsid protein of AAV8 and the 7-mer peptide is inserted between N590 and T591 of the capsid protein; (ix) the reference AAV capsid protein is a capsid protein of AAV9 and the 7-mer peptide is inserted between Q588 and A589 of the capsid protein; (x) the reference AAV capsid protein is a capsid protein of AAVrh10 and the 7-mer peptide is inserted between N590 and A591 of the capsid protein; (xi) the reference AAV capsid protein is a capsid protein of AAVpo.1 and the 7-mer peptide is inserted between N567 and S568 or between N569 and T570 of the capsid protein; or (xii) the reference AAV capsid protein is a capsid protein of AAV12 and the 7-mer peptide is inserted between N592 and A593 or between T594 and T595 of the capsid protein.

[0016] In some embodiments, the modified AAV capsid protein has a sequence of SEQ ID NO: 158.

[0017] In some embodiments, the reference AAV capsid protein is a liver-toggle mutant of a capsid protein of an AAV variant selected from the group consisting of: AAV2; AAV1; AAV6; AAV3; AAV LK03; AAV7; AAV8; AAV hu.37; AAV rh.10; AAV9; AAV hu.68; AAV10; AAV5; AAV3-3; AAV4-4; AAV1-A; hu.46-A; hu.48-A; hu.44-A; hu.43-A; AAV6-A; hu.34-B; hu.47-B; hu.29-B; rh.63-B; hu.56-B; hu.45-B; rh.57-B; rh.35-B; rh.58-B; rh.28-B; rh.51-B; rh.19-B; rh.49-B; rh.52-B; rh.13-B; AAV2-B; rh.20-B; rh.24-B; rh.64-B; hu.27-B; hu.21-B; hu.22-B; hu.23-B; hu.7-C; hu.61-C; rh.56-C; hu. 9-C; hu.54-C; hu.53-C; hu.60-C; hu.55-C; hu.2-C; hu.1-C; hu.18-C; hu.3-C; hu.25-C; hu.15-C; hu.16-C; hu.11-C; hu.10-C; hu.4-C; rh.54-D; rh.48-D; rh.55-D; rh.62-D; AAV7-D; rh.52-E; rh.51-E; hu.39-E; rh.53-E; hu.37-E; rh.43-E; rh.50-E; rh.49-E; rh.61-E; hu.41-E; rh.64-E; rh74; hu.42-E; rh.57-E; rh.40-E; hu.67-E; hu.17-E; hu.6-E; hu.66-E; rh.38-E; hu.32-F; AAV9/hu; hu.31-F; Anc80; Anc81; Anc82; Anc83; Anc84; Anc94; Anc113; Anc126; Anc127; Anc80L27; Anc80L59; Anc80L60; Anc80L62; Anc80L65; Anc80L33; Anc80L36; Anc80L44; Anc80L1; Anc110; and Anc80DI. In some embodiments, the reference AAV capsid protein is a liver-toggle mutant of a capsid protein having a sequence selected from SEQ ID Nos: 54-152 or a fragment thereof.

[0018] In some embodiments, the modified AAV capsid protein comprises an alanine (A) amino acid residue at an amino acid position corresponding to position 266 in Anc80; or a lysine (K) amino acid residue at an amino acid position corresponding to position 168 in Anc80.

[0019] In some embodiments, the modified AAV capsid protein comprises a glycine (G) amino acid residue at an amino acid position corresponding to position 266 in Anc80; or an arginine (R) amino acid residue at an amino acid position corresponding to position 168 in Anc80.

[0020] In some embodiments, the reference AAV capsid protein is a liver toggle mutant of a capsid protein of AAV9 comprising an alanine (A) amino acid residue at an amino acid position 267 and a threonine (T) amino acid residue at an amino acid position 269. In some embodiments, the modified AAV capsid protein comprises the sequence of SEQ ID NO: 159.

[0021] In some embodiments, the modified AAV capsid protein comprises a glycine (G) amino acid residue at an amino acid position corresponding to position 266 in Anc80; or a lysine (K) amino acid residue at an amino acid position corresponding to position 168 in Anc80.

[0022] In another aspect, the present disclosure provides a modified adeno-associated virus (AAV) capsid protein, comprising: (i) a liver-toggle mutant of a reference AAV capsid protein, comprising a) an alanine (A) or glycine (G) amino acid residue at an amino acid position corresponding to position 266 in Anc80; or b) a lysine (K) or arginine (R) amino acid residue at an amino acid position corresponding to position 168 in Anc80; and (ii) a targeting peptide inserted into a site within VR VIII of the liver-toggle mutant.

[0023] In some embodiments, the liver-toggle mutant comprises: a) an alanine (A) amino acid residue at an amino acid position corresponding to position 266 in Anc80; or b) a lysine (K) amino acid residue at an amino acid position corresponding to position 168 in Anc80. In some embodiments, the liver-toggle mutant comprises: a) an alanine (A) amino acid residue at an amino acid position corresponding to position 266 in Anc80; and b) a lysine (K) amino acid residue at an amino acid position corresponding to position 168 in Anc80.

[0024] In some embodiments, the liver-toggle mutant comprises: a) a glycine (G) amino acid residue at an amino acid position corresponding to position 266 in Anc80; or b) an arginine (R) amino acid residue at an amino acid position corresponding to position 168 in Anc80. In some embodiments, the liver-toggle mutant comprises: a) a glycine (G) amino acid residue at an amino acid position corresponding to position 266 in Anc80; and b) an arginine (R) amino acid residue at an amino acid position corresponding to position 168 in Anc80.

[0025] In some embodiments, the targeting peptide is 7-mer peptide having the sequence RGDX¹X²X³X⁴ (SEQ ID NO: 52), wherein X¹ to X⁴ are independently selected amino acid residues. In some embodiments, X¹, X², and X³ are independently selected from L, G, V, and A; and X⁴ is selected from S, V, A, G, and L. In some embodiments, X¹, X², and X³ are independently selected from L, V, and A; and at least two of X¹, X², and X³ are independently L. In some embodiments, X² is L. In some embodiments, 7-mer peptide has a sequence of RGDLLLS (SEQ ID NO: 1).

[0026] In some embodiments, the targeting peptide is the 7-mer peptide TLAVPFK (SEQ ID NO: 53). In some embodiments, the targeting peptide has a sequence selected from SEQ ID Nos: 2-51 and 53.

[0027] In some embodiments, the reference AAV capsid protein is a capsid protein of an AAV variant selected from the group consisting of: AAV2; AAV1; AAV6; AAV3; AAV LK03; AAV7; AAV8; AAV hu.37; AAV rh.10; AAV9; AAV hu.68; AAV10; AAV5; AAV3-3; AAV4-4; AAV1-A; hu.46-A; hu.48-A; hu.44-A; hu.43-A; AAV6-A; hu.34-B; hu.47-B; hu.29-B; rh.63-B; hu.56-B; hu.45-B; rh.57-B; rh.35-B; rh.58-B; rh.28-B; rh.51-B; rh.19-B; rh.49-B; rh.52-B; rh.13-B; AAV2-B; rh.20-B; rh.24-B; rh.64-B; hu.27-B; hu.21-13; hu.22-B; hu.23-B; hu.7-C; hu.61-C; rh.56-C; hu. 9-C; hu.54-C; hu.53-C; hu.60-C; hu.55-C; hu.2-C; hu.1-C; hu.18-C; hu.3-C; hu.25-C; hu.15-C; hu.16-C; hu.11-C; hu.10-C; hu.4-C; rh.54-D; rh.48-D; rh.55-D; rh.62-D; AAV7-D; rh.52-E; rh.51-E; hu.39-E; rh.53-E; hu.37-E; rh.43-E; rh.50-E; rh.49-E; rh.61-E; hu.41-E; rh.64-E; rh74; hu.42-E; rh.57-E; rh.40-E; hu.67-E; hu.17-E; hu.6-E; hu.66-E; rh.38-E; hu.32-F; AAV9/hu; hu.31-F; Anc80; Anc8l; Anc82; Anc83; Anc84; Anc94; Anc113; Anc126; Anc127; Anc80L27; Anc80L59; Anc80L60; Anc80L62; Anc80L65; Anc80L33; Anc80L36; Anc80L44; Anc80L1; Anc110; and Anc80DI. In some embodiments, the reference AAV capsid protein is a capsid protein having a sequence selected from SEQ ID Nos: 54-152 or a fragment thereof.

[0028] In some embodiments, the reference AAV capsid polypeptide is an AAV9 capsid protein.

[0029] In some embodiments, the liver-toggle mutant comprises an alanine (A) amino acid residue at position 267. In some embodiments, the liver-toggle mutant comprises a threonine (T) amino acid residue at position 269. In some embodiments, the liver-toggle mutant comprises an alanine (A) amino acid residue at position 267 and a threonine (T) amino acid residue at position 269.

[0030] In some embodiments, the targeting peptide is inserted into an amino acid position between 565 and 595 of the liver toggle mutant. In some embodiments, (i) the reference AAV capsid protein is a capsid protein of AAV1 and the targeting peptide is inserted between D590 and P591 or between S588 and T589 of the liver-toggle mutant; (ii) the reference AAV capsid protein is a capsid protein of AAV2 and the targeting peptide is inserted between R588 and Q589 or between N587 and R588 of the liver-toggle mutant; (iii) the reference AAV capsid protein is a capsid protein of AAV3b and the targeting peptide is inserted between S586 and S587 or between N588 and T589 of the liver-toggle mutant; (iv) the reference AAV capsid protein is a capsid protein of AAV4 and the targeting peptide is inserted between S584 and N585 or between S586 and N587 of the liver-toggle mutant; (v) the reference AAV capsid protein is a capsid protein of AAV5 and the targeting peptide is inserted between S575 and S576 or between T577 and T578 of the liver-toggle mutant; (vi) the reference AAV capsid protein is a capsid protein of AAV6 and the targeting peptide is inserted between D590 and P591 or S588 and T589 of the liver-toggle mutant; (vii) the reference AAV capsid protein is a capsid protein of AAV7 and the targeting peptide is inserted between N589 and T590 of the liver-toggle mutant; (viii) the reference AAV capsid protein is a capsid protein of AAV8 and the targeting peptide is inserted between N590 and T591 of the liver-toggle mutant; (ix) the reference AAV capsid protein is a capsid protein of AAV9 and the targeting peptide is inserted between Q588 and A589 of the liver-toggle mutant; (x) the reference AAV capsid protein is a capsid protein of AAVrh10 and the targeting peptide is inserted between N590 and A591 of the liver-toggle mutant; (xi) the reference AAV capsid protein is a capsid protein of AAVpo.1 and the targeting peptide is inserted between N567 and S568 or between N569 and T570 of the liver-toggle mutant; or (xii) the reference AAV capsid protein is a capsid protein of AAV12 and the targeting peptide is inserted between N592 and A593 or between T594 and T595 of the liver-toggle mutant.

[0031] In some embodiments, the liver-toggle mutant comprises a sequence selected from NSTSGASS (SEQ ID NO: 160), NSTSGGST (SEQ ID NO: 161) and NSTSGAST (SEQ ID NO: 162).

[0032] In some embodiments, the liver-toggle mutant of a reference AAV capsid protein, comprises a) an alanine (A) amino acid residue at an amino acid position corresponding to position 266 in Anc80; and b) a lysine (K) amino acid residue at an amino acid position corresponding to position 168 in Anc80

[0033] In some embodiments, the liver-toggle mutant of a reference AAV capsid protein, comprises a) an alanine (A) amino acid residue at an amino acid position corresponding to position 267 in AAV9; and b) a threonine (T) amino acid residue at an amino acid position corresponding to position 269 in AAV9.

[0034] In some embodiments, the liver-toggle mutant further comprises a) an alanine (A) amino acid residue at an amino acid position corresponding to position 504 in AAV9; and b) an alanine (A) amino acid residue at an amino acid position corresponding to position 505 in AAV9.

[0035] In some embodiments, the modified AAV capsid protein comprises a sequence of SEQ ID NO: 159.

[0036] In yet another aspect, the present disclosure provides a polynucleotide encoding the modified AAV capsid protein disclosed herein. In one aspect, the present disclosure relates to a vector comprising the polynucleotide. In some embodiments, the vector further comprises a promoter operably linked to the polynucleotide. Further disclosed herein includes a host cell comprising the modified AAV capsid protein, the polynucleotide, or the vector.

[0037] One aspect of the present disclosure provides a recombinant AAV virion (rAAV) comprising the modified AAV capsid protein disclosed herein. In some embodiments, the rAAV virion further comprises an exogenous polynucleotide. In some embodiments, the exogenous polynucleotide comprises a template for homology directed repair. In some embodiments, the exogenous polynucleotide comprises an expressible polynucleotide encoding a therapeutic tRNA, miRNA, gene editing guide RNA, or RNA-editing guide RNA. In some embodiments, the exogenous polynucleotide comprises an expressible polynucleotide encoding a therapeutic protein.

[0038] Another aspect of the present disclosure provides a pharmaceutical composition comprising the modified AAV capsid protein or the AAV virion.

[0039] It further discloses a method for treating or ameliorating or preventing a disease or condition in a subject, comprising administering a therapeutically effective amount of the AAV virion or the pharmaceutical composition of the present disclosure. In some embodiments, the disease is a muscular disease and/or the condition is muscle degeneration. In some embodiments, said muscle is a striated muscle, preferably heart or a skeletal muscle or diaphragm. In some embodiments, said muscular disease is a muscular dystrophy, a cardiomyopathy, a myotonia, a muscular atrophy, a myoclonus dystonia, a mitochondrial myopathy, a rhabdomyolysis, a fibromyalgia, and/or a myofascial pain syndrome.

[0040] In one aspect, the present disclosure provides a modified adeno-associated virus (AAV) capsid protein for use in treating and/or preventing a muscular disease and/or muscle degeneration. It further discloses an AAV virion comprising the modified AAV capsid protein for use in treating and/or preventing a muscular disease and/or in muscle regeneration. It also discloses a pharmaceutical composition comprising the modified AAV capsid protein, and/or the AAV virion for use in treating and/or preventing a muscular disease and/or in muscle regeneration. Additionally, provided herein includes use of the AAV capsid polypeptide, and/or the AAV virion for transferring an active compound into a muscle cell. In some embodiments, said use is a non-therapeutic use, preferably wherein said use is an in vitro use.

[0041] In one aspect, the present disclosure provides a method of transferring an exogenous polynucleotide into a muscle cell, comprising the step of administering the AAV virion of the present disclosure to a subject. In some embodiments, the administration results in transfer of the exogenous polynucleotide in the muscle cell, at a muscle:liver infection ratio of greater than 1 when measured by genome copies of the AAV virion. In some embodiments, the muscle:liver infection ratio ranges from 1 to 100. In some embodiments, the muscle:liver infection ration ranges from 1 to 10. In some embodiments, the muscle:liver infection ratio ranges from 2 to 8.

[0042] In some embodiments, the administration results in expression of the exogenous polynucleotide in the muscle cell, at a muscle:liver expression ratio of greater than 10. In some embodiments, the muscle:liver expression ratio ranges from 10 to 100. In some embodiments, the muscle:liver expression ratio ranges from 20 to 80. In some embodiments, the muscle:liver expression ratio ranges from 50 to 80 when measured by mRNA transcript expression. In some embodiments, the muscle:liver expression ratio ranges from 10 to 50 when measured by protein expression.

[0043] In some embodiments, the muscle cell is selected from triceps surae, biceps, heart and quadricep.

[0044] In another aspect, the present disclosure provides an rAAV whose genome comprises an MTM1 coding sequence operably linked to an expression regulatory element (ERE); and one, two or all three of the following features: (a) the ERE is a hybrid expression regulatory element (ERE) comprising a CMV enhancer and a chicken beta actin promoter operably linked to the MTM1 coding sequence; and/or (b) the rAAV comprises a modified AAV capsid protein comprising at least one liver-toggle mutation and/or one muscle-targeting element; and/or (c) the MTM1 coding sequence is codon optimized for expression in human cells, optionally wherein the coding sequence has at least 90%, at least 95%, at least 98% or at least 99% sequence identity to any one of SEQ ID NOS:167 to 170.

[0045] In some embodiments, the MTM1 sequence encodes a protein comprising an amino acid sequence having at least 95% sequence identity to the amino acid sequence of SEQ ID NO: 164. In some embodiments, the MTM1 protein comprises an amino acid sequence having at least 98% or at least 99% sequence identity to the amino acid sequence of SEQ ID NO:164. In some embodiments, the MTM1 protein comprises an amino acid sequence having 100% sequence identity to the amino acid sequence of SEQ ID NO:164.

[0046] In some embodiments, the MTM1 sequence encodes a protein comprising an amino acid sequence having at least 95% sequence identity to the amino acid sequence of SEQ ID NO:165. In some embodiments, the MTM1 protein comprises an amino acid sequence having at least 98% sequence identity to the amino acid sequence of SEQ ID NO:165. In some embodiments, the MTM1 protein comprises an amino acid sequence having at least 99% sequence identity to the amino acid sequence of SEQ ID NO:165. In some embodiments, the MTM1 protein comprises an amino acid sequence having 100% sequence identity to the amino acid sequence of SEQ ID NO:165.

[0047] In some embodiments, the MTM1 coding sequence comprises a nucleotide sequence having at least 90% sequence identity to SEQ ID NO 166. In some embodiments, the MTM1 coding sequence comprises a nucleotide sequence having at least 95% sequence identity to SEQ ID NO:166. In some embodiments, the MTM1 coding sequence comprises a nucleotide sequence having at least 98% sequence identity to SEQ ID NO:166. In some embodiments, the MTM1 coding sequence comprises a nucleotide sequence having at least 99% sequence identity to SEQ ID NO:166. In some embodiments, the MTM1 coding sequence comprises a nucleotide sequence having 100% sequence identity to SEQ ID NO:166.

[0048] In some embodiments, the MTM1 coding sequence is codon optimized for expression in human cells. In some embodiments, the MTM1 coding sequence comprises a nucleotide sequence having at least 90% sequence identity to any one of SEQ ID NOS:167 to 170. In some embodiments, the MTM1 coding sequence comprises a nucleotide sequence having at least 95% sequence identity to any one of SEQ ID NOS: 167 to 170. In some embodiments, the MTM1 coding sequence comprises a nucleotide sequence having at least 98% sequence identity to any one of SEQ ID NOS: 167 to 170. In some embodiments, the MTM1 coding sequence comprises a nucleotide sequence having at least 99% sequence identity to any one of SEQ ID NOS:167 to 170. In some embodiments, the MTM1 coding sequence comprises a nucleotide sequence having 100% sequence identity to any one of SEQ ID NOS:167 to 170. In some embodiments, the sequence identity is to SEQ ID NO:167. In some embodiments, the sequence identity is to SEQ ID NO: 168. In some embodiments, the sequence identity is to SEQ ID NO:169, In some embodiments, the sequence identity is to SEQ ID NO:169.

[0049] In some embodiments, the rAAV comprises a hybrid expression regulatory element (ERE) comprising a CMV enhancer and a chicken beta actin promoter operably linked to the MTM1 coding sequence.

[0050] In some embodiments, the ERE comprises (a) a nucleotide sequence having at least 90% sequence identity to SEQ ID NO: 171 and a nucleotide sequence having at least 90% sequence identity to SEQ ID NO:172 or (b) a nucleotide sequence having at least 90% sequence identity to SEQ ID NO:173. In some embodiments, the ERE comprises (a) a nucleotide sequence having at least 95% sequence identity to SEQ ID NO:171 and a nucleotide sequence having at least 95% sequence identity to SEQ ID NO: 172 or (b) a nucleotide sequence having at least 95% sequence identity to SEQ ID NO:173. In some embodiments, the ERE comprises (a) a nucleotide sequence having at least 98% sequence identity to SEQ ID NO: 171 and a nucleotide sequence having at least 98% sequence identity to SEQ ID NO: 172 or (b) a nucleotide sequence having at least 98% sequence identity to SEQ ID NO:173. In some embodiments, the ERE comprises (a) a nucleotide sequence having at least 99% sequence identity to SEQ ID NO:171 and a nucleotide sequence having at least 99% sequence identity to SEQ ID NO:172 or (b) a nucleotide sequence having at least 99% sequence identity to SEQ ID NO:173. In some embodiments, the ERE comprises (a) a nucleotide sequence having 100% sequence identity to SEQ ID NO:171 and a nucleotide sequence having 100% sequence identity to SEQ ID NO:172 or (b) a nucleotide sequence having 100% sequence identity to SEQ ID NO: 173.

[0051] In some embodiments, the rAAV further comprises a chimeric intron formed from intron sequences derived from chicken beta actin and/or human betaherpes virus and/or human beta globin and/or operably linked to the MTM1 coding sequence.

[0052] In some embodiments, the chimeric intron comprises a nucleotide sequence derived from human beta globin, which optionally comprises a nucleotide sequence having at least 90% sequence identity to SEQ ID NO:174. In some embodiments, the chimeric intron comprises a nucleotide sequence derived from human beta globin comprises SEQ ID NO: 174.

[0053] In some embodiments, the chimeric intron comprises a nucleotide sequence derived from human beta herpes virus, which optionally comprises a nucleotide sequence having at least 90% sequence identity to SEQ ID NO:175. In some embodiments, the nucleotide sequence is derived from human beta herpes virus comprises SEQ ID NO:175.

[0054] In some embodiments, the chimeric intron is formed from introns from human beta herpes virus and rabbit beta globin. In some embodiments, the chimeric intron comprises a nucleotide sequence having at least 90% sequence identity to SEQ ID NO:176. In some embodiments, the chimeric intron comprises a nucleotide sequence having at least 95% sequence identity to SEQ ID NO:176. In some embodiments, the chimeric intron comprises a nucleotide sequence having at least 98% sequence identity to SEQ ID NO: 176. In some embodiments, the chimeric intron comprises a nucleotide sequence having at least 99% sequence identity to SEQ ID NO:176. In some embodiments, the chimeric intron comprises a nucleotide sequence having 100% sequence identity to SEQ ID NO:176. In some embodiments, the chimeric intron comprises the nucleotide sequence of SEQ ID NO: 176.

[0055] In some embodiments, the rAAV comprises an unmodified or modified AAV2; AAV1; AAV6; AAV3; AAV LK03; AAV7; AAV8; AAV hu.37; AAV rh.10; AAV9; AAV hu.68; AAV10; AAV5; AAV3-3; AAV4-4; AAV1-A; hu.46-A; hu.48-A; hu.44-A; hu.43-A; AAV6-A; hu.34-B; hu.47-B; hu.29-B; rh.63-B; hu.56-B; hu.45-B; rh.57-B; rh.35-B; rh.58-B; rh.28-B; rh.51-B; rh.19-B; rh.49-B; rh.52-B; rh.13-B; AAV2-B; rh.20-B; rh.24-B; rh.64-B; hu.27-B; hu.21-B; hu.22-B; hu.23-B; hu.7-C; hu.61-C; rh.56-C; hu. 9-C; hu.54-C; hu.53-C; hu.60-C; hu.55-C; hu.2-C; hu.1-C; hu.18-C; hu.3-C; hu.25-C; hu.15-C; hu.16-C; hu.11-C; hu.10-C; hu.4-C; rh.54-D; rh.48-D; rh.55-D; rh.62-D; AAV7-D; rh.52-E; rh.51-E; hu.39-E; rh.53-E; hu.37-E; rh.43-E; rh.50-E; rh.49-E; rh.61-E; hu.41-E; rh.64-E; rh74; hu.42-E; rh.57-E; rh.40-E; hu.67-E; hu.17-E; hu.6-E; hu.66-E; rh.38-E; hu.32-F; AAV9/hu; hu.31-F; Anc80; Anc81; Anc82; Anc83; Anc84; Anc94; Anc113; Anc126; Anc127; Anc80L27; Anc80L59; Anc80L60; Anc80L62; Anc80L65; Anc80L33; Anc80L36; Anc80L44; Anc80L1; Anc110; or Anc80DI capsid protein.

[0056] In some embodiments, the rAAV comprises an unmodified or modified rAAV9 capsid protein. In some embodiments, the rAAV comprises a VP1, VP2 and/or VP3 capsid protein comprising an amino acid sequence having at least 90% sequence identity to the corresponding protein(s) in AAV2; AAV1; AAV6; AAV3; AAV LK03; AAV7; AAV8; AAV hu.37; AAV rh.10; AAV9; AAV hu.68; AAV10; AAV5; AAV3-3; AAV4-4; AAV1-A; hu.46-A; hu.48-A; hu.44-A; hu.43-A; AAV6-A; hu.34-B; hu.47-B; hu.29-B; rh.63-B; hu.56-B; hu.45-B; rh.57-B; rh.35-B; rh.58-B; rh.28-B; rh.51-B; rh.19-B; rh.49-B; rh.52-B; rh.13-B; AAV2-B; rh.20-B; rh.24-B; rh.64-B; hu.27-B; hu.21-B; hu.22-B; hu.23-B; hu.7-C; hu.61-C; rh.56-C; hu. 9-C; hu.54-C; hu.53-C; hu.60-C; hu.55-C; hu.2-C; hu.1-C; hu.18-C; hu.3-C; hu.25-C; hu.15-C; hu.16-C; hu.11-C; hu.10-C; hu.4-C; rh.54-D; rh.48-D; rh.55-D; rh.62-D; AAV7-D; rh.52-E; rh.51-E; hu.39-E; rh.53-E; hu.37-E; rh.43-E; rh.50-E; rh.49-E; rh.61-E; hu.41-E; rh.64-E; rh74; hu.42-E; rh.57-E; rh.40-E; hu.67-E; hu.17-E; hu.6-E; hu.66-E; rh.38-E; hu.32-F; AAV9/hu; hu.31-F; Anc80; Anc81; Anc82; Anc83; Anc84; Anc94; Anc113; Anc126; Anc127; Anc80L27; Anc80L59; Anc80L60; Anc80L62; Anc80L65; Anc80L33; Anc80L36; Anc80L44; Anc80L1; Anc110; or Anc80DI.

[0057] In some embodiments, the rAAV comprises a VP1, VP2 and/or VP3 capsid protein comprising an amino acid sequence having at least 95% sequence identity to the corresponding protein(s) in AAV2; AAV1; AAV6; AAV3; AAV LK03; AAV7; AAV8; AAV hu.37; AAV rh.10; AAV9; AAV hu.68; AAV10; AAV5; AAV3-3; AAV4-4; AAV1-A; hu.46-A; hu.48-A; hu.44-A; hu.43-A; AAV6-A; hu.34-B; hu.47-B; hu.29-B; rh.63-B; hu.56-B; hu.45-B; rh.57-B; rh.35-B; rh.58-B; rh.28-B; rh.51-B; rh.19-B; rh.49-B; rh.52-B; rh.13-B; AAV2-B; rh.20-B; rh.24-B; rh.64-B; hu.27-B; hu.21-B; hu.22-B; hu.23-B; hu.7-C; hu.61-C; rh.56-C; hu. 9-C; hu.54-C; hu.53-C; hu.60-C; hu.55-C; hu.2-C; hu.1-C; hu.18-C; hu.3-C; hu.25-C; hu.15-C; hu.16-C; hu.11-C; hu.10-C; hu.4-C; rh.54-D; rh.48-D; rh.55-D; rh.62-D; AAV7-D; rh.52-E; rh.51-E; hu.39-E; rh.53-E; hu.37-E; rh.43-E; rh.50-E; rh.49-E; rh.61-E; hu.41-E; rh.64-E; rh74; hu.42-E; rh.57-E; rh.40-E; hu.67-E; hu.17-E; hu.6-E; hu.66-E; rh.38-E; hu.32-F; AAV9/hu; hu.31-F; Anc80; Anc81; Anc82; Anc83; Anc84; Anc94; Anc113; Anc126; Anc127; Anc80L27; Anc80L59; Anc80L60; Anc80L62; Anc80L65; Anc80L33; Anc80L36; Anc80L44; Anc80L1; Anc110; or Anc80DI.

[0058] In some embodiments, the rAAV comprises a VP1, VP2 and/or VP3 capsid protein comprising an amino acid sequence having at least 98% sequence identity to the corresponding protein(s) in AAV2; AAV1; AAV6; AAV3; AAV LK03; AAV7; AAV8; AAV hu.37; AAV rh.10; AAV9; AAV hu.68; AAV10; AAV5; AAV3-3; AAV4-4; AAV1-A; hu.46-A; hu.48-A; hu.44-A; hu.43-A; AAV6-A; hu.34-B; hu.47-B; hu.29-B; rh.63-B; hu.56-B; hu.45-B; rh.57-B; rh.35-B; rh.58-B; rh.28-B; rh.51-B; rh.19-B; rh.49-B; rh.52-B; rh.13-B; AAV2-B; rh.20-B; rh.24-B; rh.64-B; hu.27-B; hu.21-B; hu.22-B; hu.23-B; hu.7-C; hu.61-C; rh.56-C; hu. 9-C; hu.54-C; hu.53-C; hu.60-C; hu.55-C; hu.2-C; hu.1-C; hu.18-C; hu.3-C; hu.25-C; hu.15-C; hu.16-C; hu.11-C; hu.10-C; hu.4-C; rh.54-D; rh.48-D; rh.55-D; rh.62-D; AAV7-D; rh.52-E; rh.51-E; hu.39-E; rh.53-E; hu.37-E; rh.43-E; rh.50-E; rh.49-E; rh.61-E; hu.41-E; rh.64-E; rh74; hu.42-E; rh.57-E; rh.40-E; hu.67-E; hu.17-E; hu.6-E; hu.66-E; rh.38-E; hu.32-F; AAV9/hu; hu.31-F; Anc80; Anc81; Anc82; Anc83; Anc84; Anc94; Anc113; Anc126; Anc127; Anc80L27; Anc80L59; Anc80L60; Anc80L62; Anc80L65; Anc80L33; Anc80L36; Anc80L44; Anc80L1; Anc110; or Anc80DI.

[0059] In some embodiments, the rAAV comprises a VP1, VP2 and/or VP3 capsid protein comprising an amino acid sequence having at least 99% sequence identity to the corresponding protein(s) in AAV2; AAV1; AAV6; AAV3; AAV LK03; AAV7; AAV8; AAV hu.37; AAV rh.10; AAV9; AAV hu.68; AAV10; AAV5; AAV3-3; AAV4-4; AAV1-A; hu.46-A; hu.48-A; hu.44-A; hu.43-A; AAV6-A; hu.34-B; hu.47-B; hu.29-B; rh.63-B; hu.56-B; hu.45-B; rh.57-B; rh.35-B; rh.58-B; rh.28-B; rh.51-B; rh.19-B; rh.49-B; rh.52-B; rh.13-B; AAV2-B; rh.20-B; rh.24-B; rh.64-B; hu.27-B; hu.21-B; hu.22-B; hu.23-B; hu.7-C; hu.61-C; rh.56-C; hu. 9-C; hu.54-C; hu.53-C; hu.60-C; hu.55-C; hu.2-C; hu.1-C; hu.18-C; hu.3-C; hu.25-C; hu.15-C; hu.16-C; hu.11-C; hu.10-C; hu.4-C; rh.54-D; rh.48-D; rh.55-D; rh.62-D; AAV7-D; rh.52-E; rh.51-E; hu.39-E; rh.53-E; hu.37-E; rh.43-E; rh.50-E; rh.49-E; rh.61-E; hu.41-E; rh.64-E; rh74; hu.42-E; rh.57-E; rh.40-E; hu.67-E; hu.17-E; hu.6-E; hu.66-E; rh.38-E; hu.32-F; AAV9/hu; hu.31-F; Anc80; Anc81; Anc82; Anc83; Anc84; Anc94; Anc113; Anc126; Anc127; Anc80L27; Anc80L59; Anc80L60; Anc80L62; Anc80L65; Anc80L33; Anc80L36; Anc80L44; Anc80L1; Anc110; or Anc80DI.

[0060] In some embodiments, the rAAV comprises a VP1, VP2 and/or VP3 capsid protein comprising an amino acid sequence having 100% sequence identity to the corresponding protein(s) in AAV2; AAV1; AAV6; AAV3; AAV LK03; AAV7; AAV8; AAV hu.37; AAV rh.10; AAV9; AAV hu.68; AAV10; AAV5; AAV3-3; AAV4-4; AAV1-A; hu.46-A; hu.48-A; hu.44-A; hu.43-A; AAV6-A; hu.34-B; hu.47-B; hu.29-B; rh.63-B; hu.56-B; hu.45-B; rh.57-B; rh.35-B; rh.58-B; rh.28-B; rh.51-B; rh.19-B; rh.49-B; rh.52-B; rh.13-B; AAV2-B; rh.20-B; rh.24-B; rh.64-B; hu.27-B; hu.21-B; hu.22-B; hu.23-B; hu.7-C; hu.61-C; rh.56-C; hu. 9-C; hu.54-C; hu.53-C; hu.60-C; hu.55-C; hu.2-C; hu.1-C; hu.18-C; hu.3-C; hu.25-C; hu.15-C; hu.16-C; hu.11-C; hu.10-C; hu.4-C; rh.54-D; rh.48-D; rh.55-D; rh.62-D; AAV7-D; rh.52-E; rh.51-E; hu.39-E; rh.53-E; hu.37-E; rh.43-E; rh.50-E; rh.49-E; rh.61-E; hu.41-E; rh.64-E; rh74; hu.42-E; rh.57-E; rh.40-E; hu.67-E; hu.17-E; hu.6-E; hu.66-E; rh.38-E; hu.32-F; AAV9/hu; hu.31-F; Anc80; Anc81; Anc82; Anc83; Anc84; Anc94; Anc113; Anc126; Anc127; Anc80L27; Anc80L59; Anc80L60; Anc80L62; Anc80L65; Anc80L33; Anc80L36; Anc80L44; Anc80L1; Anc110; or Anc80DI.

[0061] In some embodiments, the rAAV comprises a modified AAV capsid protein comprising at least one liver-toggle mutation as compared to a reference capsid protein.

[0062] In some embodiments, the reference capsid protein is a VP1, VP2 and/or VP3 protein. In some embodiments, the reference AAV capsid protein is a capsid protein having any one of SEQ ID NOs:54-152 or a fragment thereof.

[0063] In some embodiments, the at least one liver-toggle mutation comprises: an alanine (A) or glycine (G) amino acid residue at an amino acid position corresponding to position 266 in Anc80; and/or a lysine (K) or arginine (R) amino acid residue at an amino acid position corresponding to position 168 in Anc80.

[0064] In some embodiments, the at least one liver-toggle mutation comprises: an alanine (A) amino acid residue at an amino acid position corresponding to position 266 in Anc80; and/or a lysine (K) amino acid residue at an amino acid position corresponding to position 168 in Anc80.

[0065] In some embodiments, the at least one liver-toggle mutation comprises: an alanine (A) amino acid residue at an amino acid position corresponding to position 266 in Anc80; and/or an arginine (R) amino acid residue at an amino acid position corresponding to position 168 in Anc80.

[0066] In some embodiments, the at least one liver-toggle mutation comprises: a glycine (G) amino acid residue at an amino acid position corresponding to position 266 in Anc80; and/or a lysine (K) amino acid residue at an amino acid position corresponding to position 168 in Anc80.

[0067] In some embodiments, the at least one liver-toggle mutation comprises: a glycine (G) amino acid residue at an amino acid position corresponding to position 266 in Anc80; and/or an arginine (R) amino acid residue at an amino acid position corresponding to position 168 in Anc80.

[0068] In some embodiments, the at least one liver-toggle mutation comprises an alanine (A) at an amino acid position corresponding to position 267 in AAV9. In some embodiments, the at least one liver-toggle mutation comprises a threonine (T) at an amino acid position corresponding to position 269 in AAV9.

[0069] In some embodiments, the capsid protein is a modified AAV9 capsid protein, optionally wherein the capsid protein is a modified AAV9 VP1 capsid protein.

[0070] In some embodiments, the liver-toggle mutation comprises: an alanine (A) amino acid residue at an amino acid position corresponding to position 267 in AAV9; and a threonine (T) amino acid residue at an amino acid position corresponding to position 269 in AAV9.

[0071] In some embodiments, the liver-toggle mutation further comprises an alanine (A) amino acid residue at an amino acid position corresponding to position 504 in AAV9; and/or an Alanine (A) amino acid residue at an amino acid position corresponding to position 505 in AAV9.

[0072] In some embodiments, the liver-toggle mutant comprises the sequence NSTSGASS (SEQ ID NO: 160), NSTSGGST (SEQ ID NO: 161) or NSTSGAST (SEQ ID NO:162). In some embodiments, the rAAV capsid protein has the sequence of SEQ ID NO:159. In some embodiments, the rAAV capsid protein has the sequence of SEQ ID NO:163.

[0073] In some embodiments, the one or more liver toggle mutations comprise one or more amino acid substitutions at one or more of Q263, S264, G265, A266, S267, N268, H271, N382, G383, S384, Q385, S446, R471, W502, T503, D528, D529, Q589, K706, and V708 as compared to an AAV2 reference capsid protein (SEQ ID NO:1 of WO2021/050614, which is incorporated by reference herein).

[0074] In some embodiments, the one or more liver toggle mutations comprise the amino acid substitution S446R as compared to a reference capsid protein. In some embodiments, the one or more liver toggle mutations comprise the amino acid substitution R471A as compared to a reference capsid protein. In some embodiments, the one or more liver toggle mutations comprise the amino acid substitution V708T or V708A as compared to a reference capsid protein.

[0075] In some embodiments, the rAAV comprises a modified AAV capsid protein comprising at least one muscle-targeting element as compared to a reference capsid protein. In some embodiments, the reference capsid protein is a VP1, VP2 and/or VP³ protein.

[0076] In some embodiments, the muscle targeting element is 7-mer peptide having the sequence RGDX1X2X3X4 (SEQ ID NO:52), wherein X1 to X4 are independently selected amino acid residues. In some embodiments, X1, X2, and X3 are independently selected from L, G, V, and A; and X4 is selected from S, V, A, G, and L. In some embodiments, X1, X2, and X3 are independently selected from L, V, and A; and at least two of X1, X2, and X3 are independently L. In some embodiments, X2 is L.

[0077] In some embodiments, 7-mer peptide has a sequence of RGDLLLS (SEQ ID NO: 1). In some embodiments, the targeting peptide is the 7-mer peptide TLAVPFK (SEQ ID NO:53). In some embodiments, the targeting peptide is a peptide having any one of SEQ ID NOs:2-51 and 53.

[0078] In some embodiments, the muscle-targeting element consists of a 7-mer peptide having the sequence RGDLLLS (SEQ ID NO:1) inserted into a site within VR VIII of the AAV capsid protein. In some embodiments, the 7-mer peptide is inserted into an amino acid position between 565 and 595 of the reference AAV capsid protein.

[0079] In some embodiments, the reference AAV capsid protein is a capsid protein of AAV1 and a 7-mer muscle-targeting peptide is inserted between D590 and P591 or between S588 and T589 of the capsid protein; the reference AAV capsid protein is a capsid protein of AAV2 and the 7-mer muscle-targeting peptide is inserted between R588 and Q589 or between N587 and R588 of the capsid protein; the reference AAV capsid protein is a capsid protein of AAV3b and the 7-mer muscle-targeting peptide is inserted between S586 and S587 or between N588 and T589 of the capsid protein; the reference AAV capsid protein is a capsid protein of AAV4 and the 7-mer muscle-targeting peptide is inserted between S584 and N585 or between S586 and N587 of the capsid protein; the reference AAV capsid protein is a capsid protein of AAV5 and the 7-mer muscle-targeting peptide is inserted between S575 and S576 or between T577 and T578 of the capsid protein; the reference AAV capsid protein is a capsid protein of AAV6 and the 7-mer muscle-targeting peptide is inserted between D590 and P591 or S588 and T589 of the capsid protein; the reference AAV capsid protein is a capsid protein of AAV7 and the 7-mer muscle-targeting peptide is inserted between N589 and T590 of the capsid protein; the reference AAV capsid protein is a capsid protein of AAV8 and the 7-mer muscle-targeting peptide is inserted between N590 and T591 of the capsid protein; the reference AAV capsid protein is a capsid protein of AAV9 and the 7-mer muscle-targeting peptide is inserted between Q588 and A589 of the capsid protein; the reference AAV capsid protein is a capsid protein of AAVrh10 and the 7-mer muscle-targeting peptide is inserted between N590 and A591 of the capsid protein; the reference AAV capsid protein is a capsid protein of AAVpo.1 and the 7-mer muscle-targeting peptide is inserted between N567 and S568 or between N569 and T570 of the capsid protein; or the reference AAV capsid protein is a capsid protein of AAV12 and the 7-mer muscle-targeting peptide is inserted between N592 and A593 or between T594 and T595 of the capsid protein.

[0080] In some embodiments, the muscle targeting peptide is inserted into a site within VR VIII of a liver-toggle mutant capsid, optionally a liver-toggle mutant capsid as described in any one of embodiments 49 to 62. In some embodiments, the muscle targeting peptide is inserted into an amino acid position between 565 and 595 of the liver toggle mutant.

[0081] In some embodiments, the reference AAV capsid protein is a capsid protein of AAV1 and the targeting peptide is inserted between D590 and P591 or between S588 and T589 of the liver-toggle mutant; the reference AAV capsid protein is a capsid protein of AAV2 and the targeting peptide is inserted between R588 and Q589 or between N587 and R588 of the liver-toggle mutant; the reference AAV capsid protein is a capsid protein of AAV3b and the targeting peptide is inserted between S586 and S587 or between N588 and T589 of the liver-toggle mutant; the reference AAV capsid protein is a capsid protein of AAV4 and the targeting peptide is inserted between S584 and N585 or between S586 and N587 of the liver-toggle mutant; the reference AAV capsid protein is a capsid protein of AAV5 and the targeting peptide is inserted between S575 and S576 or between T577 and T578 of the liver-toggle mutant; the reference AAV capsid protein is a capsid protein of AAV6 and the targeting peptide is inserted between D590 and P591 or S588 and T589 of the liver-toggle mutant; the reference AAV capsid protein is a capsid protein of AAV7 and the targeting peptide is inserted between N589 and T590 of the liver-toggle mutant; the reference AAV capsid protein is a capsid protein of AAV8 and the targeting peptide is inserted between N590 and T591 of the liver-toggle mutant; the reference AAV capsid protein is a capsid protein of AAV9 and the targeting peptide is inserted between Q588 and A589 of the liver-toggle mutant; the reference AAV capsid protein is a capsid protein of AAVrh10 and the targeting peptide is inserted between N590 and A591 of the liver-toggle mutant; the reference AAV capsid protein is a capsid protein of AAVpo.1 and the targeting peptide is inserted between N567 and 5568 or between N569 and T570 of the liver-toggle mutant; or the reference AAV capsid protein is a capsid protein of AAV12 and the targeting peptide is inserted between N592 and A593 or between T594 and T595 of the liver-toggle mutant.

[0082] In some embodiments, the capsid protein has the sequence of SEQ ID NO: 158. In some embodiments, the rAAV capsid protein has the sequence of SEQ ID NO:159.

[0083] In some embodiments, the ERE comprises a constitutive promoter. In some embodiments, the constitutive promoter is the Rous sarcoma virus (RSV) LTR promoter (optionally with the RSV enhancer), the cytomegalovirus (CMV) promoter (optionally with the CMV enhancer), the SV40 promoter, the dihydrofolate reductase (DHFR) promoter, the β-actin promoter, the phosphoglycerol kinase 1 (PGK1) promoter (optionally the minimal PGK1 promoter), or the EF1 alpha promoter (optionally with intron).

[0084] In some embodiments, the ERE comprises an inducible promoter. In some embodiments, the inducible promoter is a tetracycline or rapamycin inducible promoter. In some embodiments, the ERE comprises a muscle-specific promoter. In some embodiments, the muscle specific promoter is a desmin promoter (which is optionally a CpG depleted desmin promoter), a CKM promoter derivative or an MTM1 promoter. In some embodiments, the promoter is a human promoter.

[0085] In some embodiments, the rAAV comprises a rabbit globin poly A sequence 3′ to the MTM1 coding sequence, optionally wherein the rabbit globin poly A sequence has at least 90% sequence identity to SEQ ID NO:177. In some embodiments, the rabbit globin poly A sequence has at least 95% sequence identity to SEQ ID NO:177. In some embodiments, the rabbit globin poly A sequence has at least 98% sequence identity to SEQ ID NO:177. In some embodiments, the rabbit globin poly A sequence has at least 99% sequence identity to SEQ ID NO:177. In some embodiments, the rabbit globin poly A sequence has 100% sequence identity to SEQ ID NO:177.

[0086] In some embodiments, the genome of the rAAV comprises AAV-derived inverted terminal repeat sequences (ITRs). In some embodiments, the ITRs are derived from AAV serotype 2. In some embodiments, the rAAV comprises a first ITR having at least 90% sequence identity to SEQ ID NO: 178 and a second ITR having at least 90% sequence identity to SEQ ID NO: 179. In some embodiments, the first ITR has at least 95% sequence identity to SEQ ID NO:178 and the second ITR has at least 95% sequence identity to SEQ ID NO: 179. In some embodiments, the first JTR has at least 98% sequence identity to SEQ ID NO:178 and the second ITR has at least 98% sequence identity to SEQ ID NO: 179. In some embodiments, the first JTR has at least 99% sequence identity to SEQ ID NO:178 and the second ITR has at least 99% sequence identity to SEQ ID NO:179. In some embodiments, the first ITR 100% sequence identity to SEQ ID NO: 178 and the second ITR has 100% sequence identity to SEQ ID NO:179.

[0087] In some embodiments, the rAAV comprises a heterologous splice acceptor sequence 5′ to the MTM1 coding sequence. In some embodiments, the heterologous splice acceptor sequence is derived from human beta globin exon 3. In some embodiments, the heterologous splice acceptor sequence comprises the nucleotide sequence of SEQ ID NO: 180.

[0088] In one aspect, the present disclosure provides an rAAV comprising: modified AAV capsid protein comprising at least one liver-toggle mutation and/or one muscle-targeting element, optionally wherein the modified capsid protein comprises the amino acid sequence of SEQ ID NO:158, SEQ ID NO:159, or SEQ ID NO:163, and a genome comprising: a first ITR sequence; a hybrid expression regulatory element (ERE) comprising a CMV enhancer and a chicken beta actin promoter, optionally wherein the ERE comprises the nucleotide sequence of SEQ ID NO: 173; an MTM1 coding sequence operably linked to the ERE; and a second ITR sequence.

[0089] In some embodiments, the rAAV further comprises a chimeric intron between the ERE and the MTM1 coding sequence, optionally wherein the chimeric intron comprises the nucleotide sequence of SEQ ID NO:176. In some embodiments, the rAAV further comprises a splice acceptor site 5′ to the MTM1 coding sequence, optionally wherein the splice acceptor site comprises the nucleotide sequence of SEQ ID NO:180. In some embodiments, the rAAV further comprises a polyadenylation sequence 3′ to the MTM1 coding sequence, optionally wherein the polyadenylation sequence comprises the nucleotide sequence of SEQ ID NO: 177.

[0090] In some embodiments, the MTM1 coding sequence is codon optimized for expression in human cells, optionally wherein the MTM1 coding sequence comprises the nucleotide sequence of SEQ ID NO:167, SEQ ID NO:168, SEQ ID NO:169 or SEQ ID NO:170.

[0091] In some embodiments, the rAAV has a genome which is self-complementary, optionally wherein the genome is fully self-complementary.

[0092] The present disclosure further provides a pharmaceutical composition comprising the rAAV described herein and a pharmaceutically acceptable carrier. In some embodiments, the pharmaceutical composition is in the form of a unit dose.

[0093] In some embodiments, the pharmaceutical composition comprises 1×10¹⁰ to 1×10¹⁶ genome copy numbers (GC) of the rAAV and/or in which the rAAV concentration is 1×10¹⁰ vg/ml to 1×10¹⁶ vg/ml.

[0094] In some embodiments, the pharmaceutical composition is formulated for parenteral administration, for example systemic (e.g., intravenous), intramuscular or subcutaneous administration.

[0095] The present disclosure further discloses a host cell engineered to produce the rAAV described herein. In some embodiments, the host cell comprises a polynucleotide expressing one or more capsid proteins of the rAAV, a functional rep gene, and a recombinant nucleic acid vector comprising AAV ITRs and the MTM coding sequence operably linked to an expression regulatory element (ERE), optionally wherein the ERE is a hybrid ERE comprising a CMV enhancer and a chicken beta actin promoter.

[0096] In another aspect, the present disclosure provides a method for treating or ameliorating or preventing X-linked myotubular myopathy in a subject, comprising administering a therapeutically effective amount of the rAAV or the pharmaceutical composition described herein. In some embodiments, the effective dose comprises 1×10¹⁰ to 1×10¹⁶ genome copy numbers (GC) of the rAAV. In some embodiments, the effective dose is 1×10¹⁵ GC or less. In some embodiments, the effective dose is 5×10¹⁴ GC or less. In some embodiments, the effective dose is 1×10¹⁴ GC or less. In some embodiments, the effective dose is 5×10¹³ GC or less. In some embodiments, the effective dose is 1×10¹³ GC or less.

[0097] In some embodiments, the administration is parenteral. In some embodiments, the administration is systemic (e.g., intravenous). In some embodiments, the administration is intramuscular. In some embodiments, the administration is subcutaneous.

[0098] In yet another aspect, the present disclosure provides the rAAV or the pharmaceutical composition described herein for use in treating and/or preventing X-linked myotubular myopathy. In some embodiments, the rAAV or the pharmaceutical composition is for use in expressing myotubularin in a muscle cell.

[0099] Without being bound by theory, it is believed that the rAAVs of the disclosure have improved therapeutics indices due to higher MTM1 expression levels per viral genome administered and/or reduce off-target (e.g., liver) tropism or expression per viral genome administered as compared to a control rAAV whose genome comprises the MTM1 coding sequence under the control of the desmin promoter and/or includes an unmodified capsid protein.

### 5. BRIEF DESCRIPTION OF THE SEVERAL VIEWS OF THE DRAWINGS

[0100] These and other features, aspects, and advantages of the present invention will become better understood with regard to the following description, and accompanying drawings where.

[0101] FIG. 1 illustrates the structure of an AAV VP1 protein with certain variable regions (VR I, VR III, VR IV) highlighted. The location of the liver toggle (mut1) in VR I and the peptide insertion (deco1) in VR VIII are indicated.

[0102] FIGS. 2A-2C provide the sequence alignment of VP1 sequences of certain AAV variants using AAV2 VP1 as a reference. The location of residue 168, the liver toggle site, mut1 (FIG. 2A), and the site of targeting peptide, deco1, insertion (FIG. 2B), are indicated.

[0103] FIGS. 3A-3D provide the sequence alignment of VP1 sequences of ancestral AAVs using AAV2 as a reference. The location of the liver toggle sites, residue 168 (FIG. 3A), and residue 266 (FIG. 3B), and the insertion site of a targeting peptide (FIG. 3C), are indicated. One or more representative member sequences for each of the Anc80, Anc81, Anc82, Anc83, Anc84, Anc94, Ac110, Anc113, Anc126 and Anc127 libraries were used for the alignment.

[0104] FIGS. 4A-4J shows immunohistochemistry data obtained from the experiment described in Example 2 below in the Example section. Anti-GFP immunohistochemistry was performed on liver with vehicle (FIG. 4A), AAV9 (FIG. 4B), AAV^{mut1} (FIG. 4C), AAV^{deco1} (FIG. 4D), or AAV^{mut1-deco1} (FIG. 4E); and skeletal muscle (quadriceps) tissue cross-sections of mice injected with vehicle (FIG. 4F), AAV9 (FIG. 4G), AAV^{mut1} (FIG. 4I), AAV^{deco1} (FIG. 4I), or AAV^{mut1-deco1} (FIG. 4J).

[0105] FIGS. 5A-5B show mRNA expression in various tissues of C57BL/6 mice treated with different AAV vectors, as measure by RT-ddPCR. Y-axis represents the ratio of copies of eGFP mRNA transcripts over RPP30 mRNA and x-axis represents AAV vectors and the dose injected into the experimental animals. Each graph shows eGFP expression in liver (FIG. 5A) and quadriceps (FIG. 5B).

[0106] FIGS. 6A-6E show eGFP mRNA expression in various tissues of C57BL/6 mice treated with different AAV vectors, as measure by RT-ddPCR. Y-axis represents the ratio of copies of eGFP over RPP30 mRNA and x-axis represents AAV vectors and the dose injected into the experimental animals. Each graph shows eGFP expression in liver (FIG. 6A), heart (FIG. 6B), triceps surae (FIG. 6C), quadriceps (FIG. 6D), or diaphragm (FIG. 6E).

[0107] FIGS. 7A-7D show eGFP vector genome (DNA) and eGFP expression (mRNA) in liver and quad tissues of C57BL/6 mice treated with vehicle, AAV^{Mut1} and AAV^{Mut1-deco1} AAV vectors. DNA data is shown in FIGS. 7A and 7B with eGFP genomic copies as measured by RT-ddPCR plotted at 14 and 28 days, respectively. Y-axis represents vector genome (copies per DPG) and x-axis represents vehicle and AAV vectors. mRNA data is shown in FIGS. 7C and 7D with eGFP expression as measured by RT-ddPCR plotted at 14 and 28 days, respectively. Y-axis represents the ratio of copies of eGFP over RPP30 mRNA and x-axis represents AAV vectors.

[0108] FIG. 8 shows eGFP mRNA expression in various tissues of BalbC mice treated with vehicle, AAV^{mut1} and AAV^{mut1-deco1} AAV vectors, as measured by RT-ddPCR. Y-axis represents the ratio of copies of eGFP over RPP30 mRNA and x-axis represents AAV vectors and the dose injected into the experimental animals. The graph shows eGFP expression in liver (left) and quadriceps (right).

[0109] FIGS. 9A and 9B show exemplary IHC tissue analysis obtained from of Run 1 samples from NHPs. Liver tissue is shown in FIG. 9A, the left side shows tissue obtained from an AAV9 vector treated NHP and the right side shows tissue obtained from an AAV^{mut1_deco1} vector treated NHP; exemplary IHC quadriceps tissue is shown in FIG. 9B, obtained from AAV9 vector treated NHP on left and AAV^{mut1_deco1} vector treated NHP on the right.

[0110] FIG. 10 shows the % GFP positive cells in the liver tissue (right and left side of the organ) and quadriceps tissue (right and left leg) in slides obtained from Run 1 from NHPs administered vehicle, AAV9 or AAV^{mut1-deco1} vector.

[0111] FIG. 11 shows the % GFP positive cells in various skeletal muscle and liver tissue (average from Runs 1 and 2) in slides obtained from NHPs administered vehicle, AAV9 or AAV^{mut1_deco1} vector.

[0112] FIG. 12 shows the % GFP positive cells per animal in various skeletal muscle and liver tissue (average from Runs 1 and 2) in slides obtained from NHPs administered vehicle, AAV9 or AAV^{mut1_deco1} vector.

[0113] FIG. 13 shows the average combined quantification of % GFP positive cells per animal in various skeletal muscle and liver tissue (average from Runs 1 and 2) obtained from NHPs administered vehicle, AAV9 or AAV^{mut1_deco1} vector.

[0114] FIG. 14 shows the % GFP positive cells in various cardiac tissues (average from Runs 1 and 2) obtained from NHPs administered vehicle, AAV9 or AAV^{mut1_deco1} vector.

[0115] FIG. 15 shows the % GFP positive cells per animal in various cardiac muscle (average from Runs 1 and 2) obtained from NHPs administered vehicle, AAV9 or AAV^{mut1_deco1} vector.

[0116] FIG. 16 shows the average % GFP positive cells per animal in ventricle wall, atria, inter ventr septum slides (average from Runs 1 and 2) obtained from NHPs administered vehicle, AAV9 or AAV^{mut1_deco1} vectors.

[0117] FIGS. 17A-17C shows the average % GFP positive cells per NHP animal in various tissues (average from Runs 1 and 2) administered vehicle and AAV9 and AAV^{mut1_deco1} vectors. FIG. 17A shows average % GFP positive cells per animal in liver tissue. FIG. 17B shows average % GFP positive cells per animal in various skeletal muscle tissue. FIG. 17C shows average % GFP positive cells per animal in various cardiac tissue.

[0118] FIGS. 18A-18D show the results of DNA samples analyzed for biodistribution of vector genomes in the liver and quadriceps tissue using a duplexed ddPCR method targeting the transgene (eGFP) and a reference gene (RPP30). The results are shown in FIGS. 18A (liver), 18B (quadriceps), 18C (biceps), 18D (heart) where the x-axis represents AAV vectors (wild type AAV9 on the left and AAV^{mut1deco1} on the right of each plot) and indicating whether the sample was taken from the left or right side of the organ/animal.

[0119] FIGS. 19A-19D show the results of mRNA transcript analysis measured by eGFP copies of eGFP over RPP30 mRNA. FIGS. 19A (liver), 19B (quadriceps), 19C (biceps), 19D (heart), are illustrated where the x-axis represents AAV vectors (wild type AAV9 on the left and AAV^{mut1deco1} on the right) and indicating whether the sample was taken from the left or right side of the organ/animal.

[0120] FIG. 20 shows human MTM1 protein expression in RD cells. The expression level of human MTM protein was determined by automated JESS-ProteinSimple instrument. Each bar represents by peak area values of JESS, either before (blue) or after (orange) being normalized to total protein load. Data were obtained from one run using the 1:4 dilution as described in the western protocol.

### 6. DETAILED DESCRIPTION OF THE INVENTION

### 6.1. Definitions

[0121] The term “reference AAV capsid protein” as used herein refers to a VP1, VP2, or VP3 capsid protein of a naturally occurring AAV variant or a non-naturally occurring VP1, VP2, or VP3 capsid protein that is known in the art.

[0122] The term “liver-toggle mutant” or “liver-toggle mutant of a reference AAV capsid protein” as used herein refers to a capsid protein comprising a sequence different from the reference AAV capsid protein by having (i) an alanine (A) or glycine (G) amino acid residue at an amino acid position corresponding to position 266 in Anc80 VP1 and/or b) a lysine (K) or arginine (R) amino acid residue at an amino acid position corresponding to position 168 in Anc80 VP1. In some embodiments, a liver-toggle mutant of a reference AAV capsid protein is a capsid protein comprising a sequence different from the reference AAV capsid protein by having an alanine (A) amino acid residue at an amino acid position corresponding to position 267 in AAV9 VP1 protein and a threonine (T) amino acid residue at an amino acid position corresponding to position 269 in AAV9 VP1. The liver toggle mutant can have tropism, specificity or distribution in a liver different from the reference AAV capsid protein when administered to a mammalian subject. The mammalian subject can be a human, non-human primate (NHP), mice, rats, birds, rabbits, guinea pigs, hamsters, farm animals (including pigs and sheep), dogs, or cats.

[0123] The term “targeting peptide” as used herein refers to a peptide capable of directing AAV to a target cell, tissue or organ in vivo. An AAV comprising a capsid protein with a targeting peptide has an increased localization in a target cell, tissue or organ compared to the AAV with a capsid protein without the target peptide.

[0124] The term “amino acid position” as here herein refers to a position of an amino acid residue in an AAV VP1 protein sequence, counted from the first amino acid in the N terminal.

[0125] For the avoidance of doubt, as used herein, the indication that an insertion site is at amino acid position X means that the targeting peptide is inserted between amino acids X and X+1, i.e., the targeting peptide is inserted after the indicated amino acid.

[0126] The term “liver off” is used herein to describe an AAV having a lower tropism to liver or less biodistribution in liver when administered to a mammalian subject compared to other AAV variants. The term “liver off” is also used to describe a modification in the AAV capsid protein that reduces the tropism to liver or biodistribution in liver when administered to a mammalian subject.

[0127] The term “liver on” is used herein to describe an AAV having a higher tropism to liver or more biodistribution in liver when administered to a mammalian subject compared to other AAV variants. The term “liver on” is also used to describe a modification in the AAV capsid protein that increases the tropism to liver or biodistribution in liver when administered to a mammalian subject.

[0128] “AAV” is adeno-associated virus and may be used to refer to the virus itself or derivatives thereof. The term covers all subtypes, serotypes and pseudotypes, and both naturally occurring and recombinant forms, except where required otherwise.

[0129] The term “AAV capsid protein” or simply “capsid protein” refers to a VP1, VP2, or VP3 capsid protein. The AAV capsid protein may be naturally occurring or synthetic/artificial (e.g., ancestral) capsid protein or a capsid protein that is modified as compared to such naturally occurring or synthetic/artificial capsid protein, referred to as a “modified AAV capsid protein” or simply “modified capsid protein”. The naturally occurring or synthetic capsid protein against which a modified AAV capsid protein is referred to herein as a “reference” capsid protein. In some embodiments, the AAV capsid protein is a wild type or modified capsid protein of AAV2; AAV1; AAV6; AAV3; AAV LK03; AAV7; AAV8; AAV hu.37; AAV rh.10; AAV9; AAV hu.68; AAV10; AAV5; AAV3-3; AAV4-4; AAV1-A; hu.46-A; hu.48-A; hu.44-A; hu.43-A; AAV6-A; hu.34-13; hu.47-B; hu.29-B; rh.63-B; hu.56-B; hu.45-B; rh.57-B; rh.35-B; rh.58-B; rh.28-B; rh.51-B; rh.19-B; rh.49-B; rh.52-B; rh.13-B; AAV2-B; rh.20-B; rh.24-B; rh.64-B; hu.27-B; hu.21-B; hu.22-B; hu.23-B; hu.7-C; hu.61-C; rh.56-C; hu. 9-C; hu.54-C; hu.53-C; hu.60-C; hu.55-C; hu.2-C; hu.1-C; hu.18-C; hu.3-C; hu.25-C; hu.15-C; hu.16-C; hu.11-C; hu.10-C; hu.4-C; rh.54-D; rh.48-D; rh.55-D; rh.62-D; AAV7-D; rh.52-E; rh.51-E; hu.39-E; rh.53-E; hu.37-E; rh.43-E; rh.50-E; rh.49-E; rh.61-E; hu.41-E; rh.64-E; rh74; hu.42-E; rh.57-E; rh.40-E; hu.67-E; hu.17-E; hu.6-E; hu.66-E; rh.38-E; hu.32-F; AAV9/hu; hu.31-F; Anc80; Anc81; Anc82; Anc83; Anc84; Anc94; Anc113; Anc126; Anc127; Anc80L27; Anc80L59; Anc80L60; Anc80L62; Anc80L65; Anc80L33; Anc80L36; Anc80L44; Anc80L1; Anc110; and Anc80DI. In some embodiments, the modified capsid protein is a modified VP1 capsid protein.

[0130] The term “amino acid position” as here herein refers to a position of an amino acid residue in an AAV VP1 protein sequence, counted from the first amino acid in the N terminal.

[0131] The term “CAG” when used in relation to a promoter or ERE refers to a promoter or ERE with chicken beta actin promoter and CMV enhancer sequences.

[0132] The term “constitutive” promoter or ERE as used herein refers to a nucleotide sequence which, when operably linked with a polynucleotide which encodes or specifies a gene product, causes the gene product to be produced in a cell under most or all physiological conditions of the cell.

[0133] The term “expression regulatory element” or “ERE” as used herein in the context of the rAAV of the disclosure refers to a nucleic acid sequence which is required for expression of the MTM1 coding sequence operably linked to the ERE. In some instances, an ERE sequence may be the core promoter sequence and in other instances, this sequence may also include an enhancer sequence and other regulatory elements which are required for expression of the gene product, for example exon sequences.

[0134] The term “functional fragment” in the context of the myotubularin or MTM1 refers to a biologically functional fragment of myotubularin or MTM1. As would be understood in the art, a biologically functional fragment is a portion or portions of a full length sequence that retain a biological function of the full length sequence. An exemplary functional fragment corresponds to amino acids 29-486 of SEQ ID NO:165 (and is disclosed herein as SEQ ID NO:164). Biological functions of MTM1 include the ability cleave or hydrolyze an endogenous phosphoinositide substrate known in the art, or an artificial phosphoinositide substrate for in vitro assays (i.e., a phosphoinositide phosphatase activity), to recruit and/or associate with other proteins such as, for example, the GTPase Rab5, the PI 3-kinase Vps34 or Vps15 (i.e., proper localization), or treat myotubular myopathy.

[0135] The term “functional variant” in the context of the myotubularin or MTM1 refers to various splicing isoforms, variants, fusion proteins, and modified forms of the wildtype MTM1 polypeptide or a functional fragment thereof. Such isoforms, bioactive fragments or variants, fusion proteins, and modified forms of the MTM1 polypeptides retain at least one biological function of the full length MTM1 protein (e.g., a protein of SEQ ID NO 165).

[0136] The term “inducible” promoter or ERE as used herein refers to a nucleotide sequence which, when operably linked with a polynucleotide which encodes or specifies a gene product, causes the gene product to be produced in a cell substantially only when an inducer which corresponds to the promoter is present in the cell.

[0137] As used herein, the term “internalizing moiety” refers to a moiety capable of interacting with a target tissue or a cell type to effect delivery of the attached molecule into the cell (i.e., penetrate desired cell; transport across a cellular membrane). In certain embodiments, an MTM1 polypeptide encoded by the rAAV of the disclosure can be a fusion protein comprising an internalizing moiety. In some embodiments, the internalizing moiety selectively, although not necessarily exclusively, targets and penetrates muscle cells. In certain embodiments, the internalizing moiety has limited cross-reactivity, and thus preferentially targets a particular cell or tissue type. In certain embodiments, suitable internalizing moieties include, for example, antibodies, monoclonal antibodies, or derivatives or analogs thereof. Other internalizing moieties include for example, homing peptides, receptors, and ligands. In certain embodiments, the internalizing moiety mediates transit across cellular membranes via an ENT2 transporter. Exemplary internalizing moieties are disclosed in U.S. Pat. No. 9,447,394 B2, the contents of which are incorporated by reference herein.

[0138] The term “inverted terminal repeat” (or “ITR”) refers to a polynucleotide sequence found at the ends of AAV genomes that form a hairpin, which contributes to the genome's ability to self-prime (allowing for primase-independent synthesis of the complementary second DNA strand) and provides for encapsidation of the genome into an AAV particle. An ITR can be a wild-type ITR or a variant thereof.

[0139] The terms “liver-toggle mutant”, “liver-toggle mutant of a reference AAV capsid protein” and the like, as used herein, refers to a capsid protein comprising a sequence different from a reference AAV capsid protein by having one or more mutations (e.g., amino acid substitutions) that alter tropism, specificity or distribution in a liver as compared to the reference AAV capsid protein when administered to a mammalian subject (such a sequence difference referred to herein as a “liver toggle mutation”). The mammalian subject can be a human, non-human primate (NHP), mice, rats, birds, rabbits, guinea pigs, hamsters, farm animals (including pigs and sheep), dogs, or cats. Exemplary liver toggle mutations are disclosed in WO2019/217911 and WO2021/050614, incorporated by reference in their entireties herein. In some embodiments, the liver toggle mutations comprise (i) an alanine (A) or guanine (G) amino acid residue at an amino acid position corresponding to position 266 in Anc80 VP1 and/or b) a lysine (K) or arginine (R) amino acid residue at an amino acid position corresponding to position 168 in Anc80 VP1. In other embodiments, a liver-toggle mutant of a reference AAV capsid protein is a capsid protein comprising a sequence different from the reference AAV capsid protein by having an alanine (A) amino acid residue at an amino acid position corresponding to position 267 in AAV9 VP1 protein and a threonine (T) amino acid residue at an amino acid position corresponding to position 269 in AAV9 VP1. In yet further embodiments, the liver toggle mutations comprise a sequence different from the reference AAV capsid protein by having any combination of (i) an arginine (R) instead of serine (S) at position 446; (ii) an alanine (A) instead of an arginine (R) at position 471; and (iii) a threonine (T) or alanine (A) instead of a valine (V) at position 708, in each case numbered according to an AAV2 reference capsid protein (SEQ ID NO:1 of WO2021/050614, which is incorporated by reference herein).

[0140] The term “liver off” is used herein to describe an AAV having a lower tropism to liver or less biodistribution in liver when administered to a mammalian subject compared to other AAV variants. The term “liver off” is also used to describe a modification in the AAV capsid protein that reduces the tropism to liver or biodistribution in liver when administered to a mammalian subject.

[0141] The term “liver on” is used herein to describe an AAV having a higher tropism to liver or more biodistribution in liver when administered to a mammalian subject compared to other AAV variants. The term “liver on” is also used to describe a modification in the AAV capsid protein that increases the tropism to liver or biodistribution in liver when administered to a mammalian subject.

[0142] The term “MTM1 coding sequence” is used herein to refer to a specific sequence of nucleotides in a polynucleotide, such as an rAAV genome or mRNA produced thereby, that encodes an MTM1 polypeptide.

[0143] The term “MTM1 polypeptide” refers to a polypeptide comprising an amino acid sequence having at least 90%, at least 95%, at least 98%, at least 99% or 100% identity to human MTM1 (SEQ ID NO:165) or a functional fragment (e.g., SEQ ID NO:164) or functional variant thereof.

[0144] The terms “operably linked” and “operatively linked” refer to the functional relationship of the nucleic acid sequences with regulatory sequences of nucleotides, such as promoters, enhancers, transcriptional and translational stop sites, and other signal sequences and indicates that two or more DNA segments are joined together such that they function in concert for their intended purposes. For example, operative linkage of nucleic acid sequences, typically DNA, to a regulatory sequence or promoter region refers to the physical and functional relationship between the DNA and the regulatory sequence or promoter such that the transcription of such DNA is initiated from the regulatory sequence or promoter, by an RNA polymerase that specifically recognizes, binds and transcribes the DNA.

[0145] The term “parenteral” administration of a composition includes, e.g., subcutaneous (s.c.), intravenous (i.v.), intramuscular (i.m.), or intrasternal injection, or infusion techniques.

[0146] The terms “peptide”, “polypeptide” and “protein” are used interchangeably herein to refer to a polymer of amino acid residues.

[0147] The term “pharmaceutically acceptable carrier” includes any of the standard pharmaceutical carriers, excipients, stabilizers and adjuvants. For examples of carriers, excipients, stabilizers and adjuvants, see Remington: The Science and Practice of Pharmacy, 22nd Revised Ed., Pharmaceutical Press, 2012.

[0148] The abbreviation “rAAV” refers to a recombinant adeno-associated viral particle composed of at least one AAV capsid protein and an encapsidated polynucleotide, sometimes referred to herein as a “genome”. rAAV can include a genome that comprises a heterologous polynucleotide (i.e., a polynucleotide other than a wild-type AAV genome), such as a heterologous polynucleotide encoding a gene delivered to a mammalian cell such as the MTM1 gene. The heterologous nucleotide is sometimes referred to as a transgene.

[0149] The term “self-complementary” rAAV vector or genome as used herein means a fully or partially self-complementary rAAV vector or genome, respectively. A “fully self-complementary” rAAV vector refers to a vector containing a genome generated by the absence of a terminal resolution site (TR) from one of the ITRs of the rAAV. The absence of a TR prevents the initiation of replication at the vector terminus where the TR is not present. In general, fully self-complementary rAAV vectors generate single-stranded, inverted repeat genomes, with a wild-type (wt) AAV TR at each end and a mutated TR (mTR) in the middle. Thus, a fully self-complementary rAAV genome is typically a single stranded polynucleotide having, in the 5′ to 3′ direction, a first ITR sequence, a heterologous sequence (e.g., MTM1 coding sequence and/or ERE), a second ITR sequence, a second heterologous sequence that is complementary to the first heterologous sequence, and a third ITR sequence. A “partially self-complementary” rAAV genome refers to a single stranded polynucleotide having, in the 5′ to 3′ direction or the 3′ to 5′ direction, a first ITR sequence, a heterologous sequence (e.g., MTM1 coding sequence and/or ERE), a second ITR sequence, and a self-complementary region that is complementary to a portion of the heterologous sequence and has a length that is less than the entire length the heterologous sequence.

[0150] The term “targeting peptide” as used herein refers to a peptide capable of directing AAV to a target cell, tissue or organ in vivo. An AAV comprising a capsid protein with a target peptide has an increased localization in a target cell, tissue or organ compared to the AAV with a capsid protein without the target peptide.

[0151] For the avoidance of doubt, as used herein, the indication that an insertion site is at amino acid position X means that the targeting peptide is inserted between amino acids X and X+l, i.e., the targeting peptide is inserted after the indicated amino acid.

[0152] The term “tissue-specific” promoter or ERE as used herein refers to a nucleotide sequence which, when operably linked with a polynucleotide encodes or specified by a gene, causes the gene product to be produced in a cell substantially only if the cell is a cell of the tissue type corresponding to the promoter.

[0153] The terms “treatment”, “treating”, and the like are used herein to generally mean obtaining a desired pharmacologic and/or physiologic effect. The effect may be prophylactic in terms of completely or partially preventing a disease, condition, or symptoms thereof, and/or may be therapeutic in terms of a partial or complete cure for a disease or condition and/or adverse effect attributable to the disease or condition. “Treatment” as used herein covers any treatment of a disease or condition of a mammal, particularly a human, and includes: (a) preventing the disease or condition from occurring in a subject which may be predisposed to the disease or condition but has not yet been diagnosed as having it; (b) inhibiting the disease or condition (e.g., arresting its development); or (c) relieving the disease or condition (e.g., causing regression of the disease or condition, providing improvement in one or more symptoms).

[0154] The terms “vector”, “AAV vector” and “rAAV vector” refer to an rAAV that comprises a heterologous polynucleotide, e.g., a transgene.

[0155] Unless otherwise defined, all technical and scientific terms used herein have the same meaning as commonly understood by one of ordinary skill in the art to which the methods and compositions of matter belong. Although methods and materials similar or equivalent to those described herein can be used in the practice or testing of the methods and compositions of matter, suitable methods and materials are described below. In addition, the materials, methods, and examples are illustrative only and not intended to be limiting. All publications, patent applications, patents, and other references mentioned herein are incorporated by reference in their entirety.

### 6.2. Modified AAV Capsid Proteins

[0156] One aspect of the present disclosure provides a modified adeno-associated virus (AAV) capsid protein, comprising: (i) a reference AAV capsid protein, and (ii) a targeting peptide inserted into an insertion site of the reference AAV capsid protein. In some embodiments, the targeting peptide is a 7-mer peptide having the sequence RGDLLLS (SEQ ID NO: 1).

[0157] In some embodiments, the modified AAV capsid protein further includes a liver-toggle mutation relative to a reference AAV capsid protein. The liver-toggle mutant can comprise (1) an alanine (A) or glycine (G) amino acid residue at an amino acid position corresponding to position 266 in Anc80 VP1; and/or (2) a lysine (K) or arginine (R) amino acid residue at an amino acid position corresponding to position 168 in Anc80 VP1.

[0158] 6.2.1. Reference AAV Capsid Proteins

[0159] The reference AAV capsid protein used in various embodiments of the present disclosure is a VP1, VP2 or VP3 capsid protein of an AAV known in the art. It can be a VP1, VP2 or VP3 capsid protein of a naturally occurring or non-naturally occurring AAV variant.

[0160] The non-naturally occurring VP1, VP2, or VP3 capsid protein includes a capsid protein generated by biological or chemical alteration or in silico design, or variation of a naturally occurring AAV capsid protein. Accordingly, the reference AAV capsid protein includes, but is not limited to, a capsid protein of various AAV serotypes (e.g., AAV1, AAV2, AAV3B, AAV5, AAV6, AAV8, and AAV9) or a variant thereof. A non-naturally occurring VP1, VP2, or VP3 capsid protein further includes an artificial capsid protein created by in silico design or synthesis. An artificial capsid protein includes, but is not limited to, AAV capsid proteins disclosed in PCT/US2014/060163, U.S. Pat. No. 9,695,220, PCT/US2016/044819, PCT/US2018/032166, PCT/US2019/031851, and PCT/US2019/047546, which are incorporated herein by reference in their entireties.

[0161] In some embodiments, the reference AAV capsid protein is the capsid protein of AAV9 (Genbank Ace. No: AAS99264.1), AAV1 (Genbank Ace. No: AAD27757.1), AAV2 (Genbank Ace. No: AAC03780.1), AAV3 (Genbank Ace. No: AAC55049.1), AAV3b (Genbank Ace. No: AF028705.1), AAV4 (Genbank Ace. No: AAC58045.1), AAV5 (Genbank Ace. No: AAD13756.1). AAV6 (Genbank Ace. No: AF028704.1), AAV7 (Genbank Ace. No: AAN03855.1), AAV 8 (Genbank Ace. No: AAN03857.1), AAV10 (Genbank Ace. No: AAT46337.1), AAVrh10 (Genbank Ace. No: AY243015.1), AAV11 (Genbank Ace. No: AAT46339.1), AAV12 (Genbank Ace. No: AB116639.1), or AAV13 (Genbank Ace. No: ABZ10812.1), AAVpol (Genbank Ace. No: FJ688147.1). In certain embodiments, the AAV capsid protein is the capsid protein of AAV9 (Genbank Ace. No: AA599264.1).

[0162] The reference AAV capsid protein can be VP1 capsid protein having a sequence selected from: SEQ ID NO: 54 (AAV1 (AAD27757)), SEQ ID NO: 55 (AAV2 (AAC03780)), SEQ ID NO: 56 (AAV3 (AAC55049)), SEQ ID NO: 57 (AAV5 (AAD13756)), SEQ ID NO: 58 (AAV6 (AAB95450)), SEQ ID NO: 59 (AAV7 (AF513851_2)), SEQ ID NO: 60 (AAV8 (AF513852_2)), SEQ ID NO: 61 (AAV9 (AAS99264)), SEQ ID NO: 62 (AAV10 (AAT46337)), SEQ ID NO: 63 (AAV hu.68), SEQ ID NO: 64 (AAV LK03), SEQ ID NO: 65 (AAV hu.1 (AAS99260)), SEQ ID NO: 66 (AAV hu.2 (AA599270)), SEQ ID NO: 67 (AAV hu.3 (AAS99280)), SEQ ID NO: 68 (AAV hu.4 (AAS99287)), SEQ ID NO: 69 (AAV hu.6 (AA599306)), SEQ ID NO: 70 (AAV hu.7 (AAS99313)), SEQ ID NO: 71 (AAV hu.9 (AAS99314)), SEQ ID NO: 72 (AAV hu.10 (AAS99261)), SEQ ID NO: 73 (AAV hu.11 (AAS99262)), SEQ ID NO: 74 (AAV hu.15 (AA S99265)), SEQ ID NO: 75 (AAV hu.16 (AA S99266)), SEQ ID NO: 76 (AAV hu.17 (AAS99267)), SEQ ID NO: 77 (AAV hu.18 (AAS99268)), SEQ ID NO: 78 (AAV hu.20 (AAS99271)), SEQ ID NO: 79 (AAV hu.21 (AAS99272)), SEQ ID NO: 80 (AAV hu.22 (AAS99273)), SEQ ID NO: 81 (AAV hu.23 (AAS99274)), SEQ ID NO: 82 (AAV hu.25 (AAS99276)), SEQ ID NO: 83 (AAV hu.27 (AAS99277)), SEQ ID NO: 84 (AAV hu.28 (AAS99278)), SEQ ID NO: 85 (AAV hu.29 (AAS99279)), SEQ ID NO: 86 (AAV hu.31 (AAS99281)), SEQ ID NO: 87 (AAV hu.32 (AA599282)), SEQ ID NO: 88 (AAV hu.34 (AAS99283)), SEQ ID NO: 89 (AAV hu.37 (AA S99285)), SEQ ID NO: 90 (AAV hu.39 (AAS99286)), SEQ ID NO: 91 (AAV hu.41 (AAS99289)), SEQ ID NO: 92 (AAV hu.42 (AAS99290)), SEQ ID NO: 93 (AAV hu.43 (AA S99291)), SEQ ID NO: 94 (AAV hu.44 (AAS99292)), SEQ ID NO: 95 (AAV hu.45 (AAS99293)), SEQ ID NO: 96 (AAV hu.46 (AAS99294)), SEQ ID NO: 97 (AAV hu.47 (AAS99295)), SEQ ID NO: 98 (AAV hu.48 (AAS99296)), SEQ ID NO: 99 (AAV hu.51 (AAS99298)), SEQ ID NO: 100 (AAV hu.52 (AAS99299)), SEQ ID NO: 101 (AAV hu.53 (AAS99300)), SEQ ID NO: 102 (AAV hu.54 (AAS99301)), SEQ ID NO: 103 (AAV hu.55 (AAS99302)), SEQ ID NO: 104 (AAV hu.56 (AAS99303)), SEQ ID NO: 105 (AAV hu.57 (AAS99304)), SEQ ID NO: 106 (AAV hu.60 (AAS99307)), SEQ ID NO: 107 (AAV hu.61 (AAS99308)), SEQ ID NO: 108 (AAV hu.63 (AAS99309)), SEQ ID NO: 109 (AAV hu.66 (AAS99311)), SEQ ID NO: 110 (AAV hu.67 (AAS99312)), SEQ ID NO: 111 (AAV rh.10 (AA088201)), SEQ ID NO: 112 (AAV rh.13 (AA088199)), SEQ ID NO: 113 (AAV rh.19 (AA088194)), SEQ ID NO: 114 (AAV rh.22 (AA088192)), SEQ ID NO: 115 (AAV rh.23 (AA088191)), SEQ ID NO: 116 (AAV rh.24 (AA088190)), SEQ ID NO: 117 (AAV rh.35 (AA088186)), SEQ ID NO: 118 (AAV rh.43 (AAS99245)), SEQ ID NO: 119 (AAV rh.48 (AAS99246)), SEQ ID NO: 120 (AAV rh.49 (AAS99247)), SEQ ID NO: 121 (AAV rh.50 (AAS99248)), SEQ ID NO: 122 (AAV rh.51 (AAS99249)), SEQ ID NO: 123 (AAV rh.52 (AAS99250)), SEQ ID NO: 124 (AAV rh.53 (AAS99251)), SEQ ID NO: 125 (AAV rh.54 (AAS99252)), SEQ ID NO: 126 (AAV rh.55 (AAS99253)), SEQ ID NO: 127 (AAV rh.57 (AAS99254)), SEQ ID NO: 128 (AAV rh.58 (AAS99255)), SEQ ID NO: 129 (AAV rh.62 (AAS99258)), SEQ ID NO: 130 (AAV rh.64 (AAS99259)), SEQ ID NO: 131 (AAV rh.56 (JA400164)), SEQ ID NO: 143 (Anc80L1), SEQ ID NO: 144 (Anc80L27), SEQ ID NO: 145 (Anc80L33), SEQ ID NO: 146 (Anc80L36), SEQ ID NO: 147 (Anc80L44), SEQ ID NO: 148 (Anc80L59), SEQ ID NO: 149 (Anc80L60), SEQ ID NO: 150 (Anc80L62), SEQ ID NO: 151 (Anc82DI), and SEQ ID NO: 152 (AAV rh.74). The reference AAV capsid protein can be a VP2 or VP3 protein having a part of one of the sequences. For example, VP2 protein can have a sequence corresponding to amino acids 138 to 736 of AAV9 VP1 and VP3 protein can have a sequence corresponding to amino acids 138 to 736 of AAV9 VP1 protein.

[0163] The reference AAV capsid protein can be VP1 capsid protein having any member sequence of the ancestral AAV library selected from SEQ ID NO: 132 (Anc80), SEQ ID NO: 133 (Anc81 (AKU89596)), SEQ ID NO: 134 (Anc82 (AKLT89597)), SEQ ID NO: 135 (Anc83 (AKU89598)), SEQ ID NO: 136 (Anc84 (AKU89599)), SEQ ID NO: 137 (Anc94) SEQ ID NO: 138 (Anc110 (AKU89600)), SEQ ID NO: 139 (Anc113 (AKU89601)), SEQ ID NO: 140 (Anc126 (AKU89602)), SEQ ID NO: 141 Anc127 (AKU89603), and SEQ ID NO: 142 (Anc80L65 (AKU89595)). The reference AAV capsid protein can be a VP2 or VP3 protein having a part of one of the sequences. For example, VP2 protein can have a sequence corresponding to amino acids 138 to 736 of AAV9 VP1 and VP3 protein can have a sequence corresponding to amino acids 138 to 736 of AAV9 VP1 protein. When a SEQ ID NO for a library sequence is used in this disclosure, it refers to a sequence of any one member of the library.

[0164] In some embodiments, the reference AAV capsid protein is a liver-toggle mutant described in WO2019/217911, which is incorporated by reference in its entirety herein.

[0165] In some embodiments, the reference AAV capsid protein is a capsid protein (VP1, VP2 or VP3) of an AAV variant selected from the group consisting of: AAV2; AAV1; AAV6; AAV3; AAV LK03; AAV7; AAV8; AAV hu.37; AAV rh.10; AAV9; AAV hu.68; AAV10; AAV5; AAV3-3; AAV4-4; AAV1-A; hu.46-A; hu.48-A; hu.44-A; hu.43-A; AAV6-A; hu.34-B; hu.47-B; hu.29-B; rh.63-B; hu.56-B; hu.45-B; rh.57-B; rh.35-B; rh.58-B; rh.28-B; rh.51-B; rh.19-B; rh.49-B; rh.52-B; rh.13-B; AAV2-B; rh.20-B; rh.24-B; rh.64-B; hu.27-B; hu.21-B; hu.22-B; hu.23-B; hu.7-C; hu.61-C; rh.56-C; hu. 9-C; hu.54-C; hu.53-C; hu.60-C; hu.55-C; hu.2-C; hu.1-C; hu.18-C; hu.3-C; hu.25-C; hu.15-C; hu.16-C; hu.11-C; hu.10-C; hu.4-C; rh.54-D; rh.48-D; rh.55-D; rh.62-D; AAV7-D; rh.52-E; rh.51-E; hu.39-E; rh.53-E; hu.37-E; rh.43-E; rh.50-E; rh.49-E; rh.61-E; hu.41-E; rh.64-E; hu.42-E; rh.57-E; rh.40-E; rh74; hu.67-E; hu.17-E; hu.6-E; hu.66-E; rh.38-E; hu.32-F; AAV9/hu; hu.31-F; Anc80L27; Anc80L59; Anc80L60; Anc80L62; Anc80L65; Anc80L33; Anc80L36; Anc80L44; Anc80L1; Anc110; and Anc80DI. In some embodiments, the reference AAV capsid protein is a capsid protein of any member protein of an ancestral AAV library selected from: Anc80; Anc8l; Anc82; Anc83; Anc84; Anc94; Anc113; Anc126; and Anc127.

[0166] In some embodiments, the reference AAV capsid protein is a protein having a sequence selected from SEQ ID Nos: 54-131 and 143-152. In some embodiments, the reference AAV capsid protein is a protein having a VP2 (corresponding to amino acids 138 to 736 of AAV9 VP1) or VP3 portion (corresponding to amino acids 138 to 736 of AAV9 VP1) of the protein having a sequence selected from SEQ ID NOs: 54-131 and 143-152.

[0167] In some embodiments, the reference AAV capsid protein is a capsid protein of the AAV variant modified to include one or more liver-toggle mutations described in WO2019/217911. In some embodiments, the reference AAV capsid protein comprises (1) an alanine (A) or glycine (G) amino acid residue at an amino acid position corresponding to position 266 in Anc80 VP1 and/or (2) a lysine (K) or arginine (R) amino acid residue at an amino acid position corresponding to position 168 in Anc80 VP1. In some embodiments, the reference AAV capsid protein comprises (i) an alanine (A) amino acid residue at an amino acid position corresponding to position 266 in Anc80 VP1 and/or b) a lysine (K) amino acid residue at an amino acid position corresponding to position 168 in Anc80 VP1. In some embodiments, the reference AAV capsid protein comprises (ii) an alanine (A) amino acid residue at an amino acid position corresponding to position 267 in AAV9 VP1 protein and/or a threonine (T) amino acid residue at an amino acid position corresponding to position 269 in AAV9 VP1.

[0168] 6.2.2. Liver-Toggle Mutant

[0169] In some embodiments, the modified AAV capsid protein comprises a liver-toggle mutant of a reference AAV capsid protein. In some embodiments, the liver-toggle mutant is different from the reference AAV capsid protein by having one or more amino acid substitutions at a variable region of the reference AAV capsid protein. In some embodiments, the one or more amino acid substitutions is at a variable region, VR I, of the reference AAV capsid protein (FIG. 1).

[0170] The liver-toggle mutant can be a natural protein or a protein genetically engineered, or biologically or chemically produced. The liver toggle mutant can have tropism, specificity or localization different from the reference AAV capsid protein, particularly in liver, when administered to a mammalian subject. The mammalian subject can be a human, non-human primate (NHP), mice, rats, birds, rabbits, guinea pigs, hamsters, farm animals (including pigs and sheep), dogs, or cats.

[0171] In some embodiments, the liver-toggle mutant comprises a sequence different from a reference AAV capsid protein by having an amino acid substitution at an amino acid position corresponding to position 266 in Anc80 VP1 and/or at an amino acid position corresponding to position 168 in Anc80 VP1.

[0172] In some embodiments, the liver-toggle mutant comprises a sequence different from a reference AAV capsid protein by having (1) an alanine (A) amino acid residue at an amino acid position corresponding to position 266 in Anc80 VP1 or (2) a lysine (K) amino acid residue at an amino acid position corresponding to position 168 in Anc80 VP1. In some embodiments, the liver-toggle mutant comprises a sequence different from a reference AAV capsid protein by having (1) an alanine (A) amino acid residue at an amino acid position corresponding to position 266 in Anc80 VP1 and (2) a lysine (K) amino acid residue at an amino acid position corresponding to position 168 in Anc80 VP1.

[0173] In some embodiments, the liver-toggle mutant comprises a sequence different from a reference AAV capsid protein by having a glycine (G) amino acid residue at an amino acid position corresponding to position 266 in Anc80; or an arginine (R) amino acid residue at an amino acid position corresponding to position 168 in Anc80. In some embodiments, the liver-toggle mutant comprises a sequence different from a reference AAV capsid protein by having a glycine (G) amino acid residue at an amino acid position corresponding to position 266 in Anc80; and an arginine (R) amino acid residue at an amino acid position corresponding to position 168 in Anc80.

[0174] An amino acid position corresponding to position 266 in Anc80 VP1 and an amino acid position corresponding to position 168 in Anc80 VP1 in various VP1 protein sequences are indicated with boxes in FIGS. 3A-C and FIGS. 4A-D.

[0175] In some embodiments, a liver-toggle mutant is different from a reference AAV capsid protein only at an amino acid position corresponding to position 266 in Anc80 VP1 or an amino acid position corresponding to position 168 in Anc80 VP1. In some embodiments, a liver-toggle mutant is different from a reference AAV capsid protein only at two amino acid positions—an amino acid position corresponding to position 266 in Anc80 VP1 and an amino acid position corresponding to position 168 in Anc80 VP1. In some embodiments, a liver-toggle mutant is different from a reference AAV capsid protein by more than the two amino acid substitutions.

[0176] In some embodiments, the liver-toggle mutant comprises a sequence different from a reference AAV capsid protein by having an alanine (A) amino acid residue at an amino acid position corresponding to position 267 in AAV9 VP1 protein or a threonine (T) amino acid residue at an amino acid position corresponding to position 269 in AAV9 VP1. In some embodiments, the liver-toggle mutant comprises a sequence different from a reference AAV capsid protein by having an alanine (A) amino acid residue at an amino acid position corresponding to position 267 in AAV9 VP1 protein and a threonine (T) amino acid residue at an amino acid position corresponding to position 269 in AAV9 VP1. In some embodiments, a liver-toggle mutant is different from a reference AAV capsid protein only at an amino acid position corresponding to position 267 in AAV9 VP1 protein or an amino acid position corresponding to position 269 in AAV9 VP1. In some embodiments, a liver-toggle mutant is different from a reference AAV capsid protein only at two amino acid positions—an amino acid position corresponding to position 267 in AAV9 VP1 protein and an amino acid position corresponding to position 269 in AAV9 VP1.

[0177] In some embodiments, a liver-toggle mutant is an AAV capsid protein disclosed in WO2019/217911, which is incorporated by reference in its entirety herein.

[0178] In particular, an AAV capsid protein that is described therein to generate a “liver off” (“liver de-targeting”) AAV can be used in embodiments herein. In other embodiments, an AAV capsid protein that is described therein to generate a “liver on” (“liver targeting”) AAV can be used herein.

[0179] In some embodiments, two amino acid positions corresponding to position 266 and position 168 of Anc80 VP1 protein are used as liver-toggle positions. In some embodiments, AAV with a capsid protein having an alanine (A) amino acid residue at an amino acid position corresponding to position 266 in Anc80 VP1 or b) a lysine (K) amino acid residue at an amino acid position corresponding to position 168 in Anc80 VP1 exhibits liver-off phenotypes. In some embodiments, AAV with a capsid protein having a glycine (G) amino acid residue at an amino acid position corresponding to position 266 in Anc80 VP1 or b) an arginine (R) amino acid residue at an amino acid position corresponding to position 168 in Anc80 VP1 exhibits liver-on phenotypes.

[0180] In some embodiments, more than one toggle region residues are introduced to enhance the liver-off or the liver-on phenotypes. In some embodiments, a double mutant AAV9 G267A S269T is used.

[0181] In some embodiments, a liver-toggle mutant is Anc80L65 capsid protein with a G266A mutation. In some embodiments, a liver-toggle mutant is AAV9 capsid protein with a G267A mutation. In some embodiments, a liver-toggle mutant is AAV9 capsid protein with G267A and S269T mutations.

[0182] In some embodiments, the liver-toggle mutant comprises (1) an alanine (A) amino acid residue at an amino acid position corresponding to position 504 in AAV9; and (2) an alanine (A) amino acid residue at an amino acid position corresponding to position 505 in AAV9.

[0183] 6.2.3. Targeting Peptide

[0184] In some embodiments, a modified AAV capsid protein of the present disclosure comprises a targeting peptide.

[0185] The target peptide can vary in length. For example, the targeting peptide can be, or be at least, three, four, five, six, seven, eight, nine, ten, eleven, twelve, fifteen, eighteen, twenty, twenty-five, thirty, or a range between any two of these values, amino acids long. In some embodiments, the targeting peptide is, or is about, seven amino acids long. In some embodiments, the targeting peptide is, or is about, eleven amino acids long. In some embodiments, the targeting peptide is, or is about, seven to eleven amino acids long.

[0186] In typical embodiments, the targeting peptide is capable of changing tropism and/or specificity of an AAV when the AAV is formed with a capsid protein containing the targeting peptide. In some embodiments, the targeting peptide increases targeting of the AAV to a target cell, tissue or organ. In some embodiments, the targeting peptide decreases targeting of the AAV to an off-target cell, tissue or organ. In some embodiments, the targeting peptide increases targeting of the AAV to a target cell, tissue or organ after systemic administration (e.g., after intravenous administration). In some embodiments, the targeting peptide decreases targeting of the AAV to an off-target cell, tissue or organ after systemic administration (e.g., after intravenous administration). In some embodiments, the targeting peptide increases targeting of the AAV to a target cell, tissue or organ after local administration. In some embodiments, the targeting peptide decreases targeting of the AAV to an off-target cell, tissue or organ after local administration.

[0187] The targeting peptide can vary in length. For example, the targeting peptide can be, or be at least, three, four, five, six, seven, eight, nine, ten, eleven, twelve, fifteen, eighteen, twenty, twenty-five, thirty, or a range between any two of these values, amino acids long.

[0188] In some embodiments, the modified AAV capsid protein comprises a single copy of the targeting peptide. In some embodiments, the modified AAV capsid protein comprises more than one copy of the targeting peptide.

[0189] In some embodiments, the targeting peptide can enhance targeting of an AAV to a brain, muscle, spinal cord, eye, liver, muscle, or other organ. In some embodiments, the targeting peptide can decrease targeting of an AAV to a brain, muscle, spinal cord, eye, liver, muscle, or other organ.

[0190] Sequences of exemplary targeting peptides that can be used various embodiments of the present disclosure are provided in SEQ ID Nos: 1-53, 153-157, and 160-162.

[0191] 6.2.3.1 7-Mer Peptide

[0192] In some embodiments, the targeting peptide is a 7-mer peptide. In some embodiments, the 7-mer peptide has the sequence RGDX¹X²X³X⁴ (SEQ ID NO: 52), wherein X¹ to X⁴ are independently selected amino acid residues. As used herein, the term “amino acid” comprises naturally occurring L- and D-amino acids and artificial, i.e. non-naturally occurring, α-amino acids. Preferably, the amino acid is a naturally occurring amino acid. In preferred embodiments, the amino acid is a naturally occurring L-α-amino acid.

[0193] In some embodiments, in the targeting peptide according to SEQ ID NO: 52, X¹, X², and X³ are independently selected from L, G, V, and A; and X⁴ is S, V, A, G, or L.

[0194] In some embodiments, X¹ is selected from L, Q, D, H, M, P, and K. In some embodiments, X¹ is L. In some embodiments, X² is selected from G, V, S, D, M, and N. In some embodiments, X² is G. In some embodiments, X³ is selected from V, M, P, S, and D. In some embodiments, X³ is V. In some embodiments, X⁴ is selected from S, N, L, H, and M. In some embodiments, X⁴ is S.

[0195] In some embodiments, the targeting peptide is according to SEQ ID NO: 52, wherein X¹ is L. In further embodiments, the targeting peptide is according to SEQ ID NO: 52, wherein X² is G. In further embodiments, the targeting peptide is according to SEQ ID NO: 52, wherein X³ is L. In further embodiments, the targeting peptide is according to SEQ ID NO: 52, wherein X⁴ is S.

[0196] In some embodiments, the targeting peptide is according to SEQ ID NO: 52, wherein X¹ is A. In further embodiments, the targeting peptide is according to SEQ ID NO: 52, wherein X² is V. In further embodiments, the targeting peptide is according to SEQ ID NO: 52, wherein X³ is G. In further embodiments, the targeting peptide is according to SEQ ID NO: 52, wherein X⁴ is V.

[0197] In some embodiments, the targeting peptide is according to SEQ ID NO: 52, wherein X¹ is L. In further embodiments, the targeting peptide is according to SEQ ID NO: 52, wherein X² is L. In further embodiments, the targeting peptide is according to SEQ ID NO: 52, wherein X³ is L. In further embodiments, the targeting peptide is according to SEQ ID NO: 52, wherein X⁴ is S.

[0198] In some embodiments, X¹ is L; X² is selected from G, L and V; X³ is selected from L and G; and/or X⁴ is selected from S, V and L. In a further embodiment, in the targeting peptide according to SEQ ID NO: 52, X¹ is L, X² is G or L, and/or X⁴ is S. In certain embodiments, in the targeting peptide according to SEQ ID NO: 52, at least one of X² and X³ is G or L.

[0199] In certain embodiments, in the targeting peptide according to SEQ ID NO: 52, X¹, X², and X³ are independently selected from L, V, and A; at least two of X¹, X², and X¹ are independently L. In some embodiments, X¹, X², and X³ are L.

[0200] In certain embodiments, in the targeting peptide according to SEQ ID NO: 52, X² is L.

[0201] In certain embodiments, the targeting peptide comprises, alternatively consists of, the amino acid sequence selected from RGDLRVS (SEQ ID NO: 153), RGDAVGV (SEQ ID NO: 154), RGDFTPTS (SEQ ID NO: 155), RGDLGLS (SEQ ID NO: 156), and RGDMSRE (SEQ ID NO: 157), and/or a sequence comprising at most two, preferably at most one, amino acid substitution compared to one of the aforesaid specific sequences. In certain embodiments, the targeting peptide does not comprise an amino acid sequence selected from RGDLRVS (SEQ ID NO: 153), RGDAVGV (SEQ ID NO: 154), RGDFTPTS (SEQ ID NO: 155), RGDLGLS (SEQ ID NO: 156), and RGDMSRE (SEQ ID NO: 157).

[0202] In some embodiments, the targeting peptide has a sequence of RGDLLLS (SEQ ID NO: 1).

[0203] 6.2.3.2 BBB Peptide

[0204] In some embodiments, the targeting peptide is the targeting peptide disclosed in US2017/0166926, incorporated by reference in its entirety herein.

[0205] The targeting peptide can have any of the sequences selected from SEQ ID NOs: 2-51 and 53 provided herein. In some embodiments, the targeting peptide is the 7-mer peptide TLAVPFK (SEQ ID NO: 53).

[0206] 6.2.4. Insertion Sites

[0207] A modified AAV capsid protein of the present disclosure comprises a targeting peptide inserted into an insertion site of a reference AAV capsid protein or a liver-toggle mutant of a reference AAV capsid protein.

[0208] Preferably, the targeting peptide is inserted at a site exposed to the exterior of the capsid, preferably based on structure predictions and/or experimental data. More preferably, the insertion site of the targeting peptide is at a site exposed to the exterior of the AAV capsid in a manner that does not interfere with the activity of said protein in capsid assembly.

[0209] In some embodiments, the insertion site is located in one of the variable regions, VR I, VR VIII, or VR IV, of the capsid protein (FIG. 1). In some embodiments, the insertion site is in the variable region, VR VIII (deco).

[0210] An insertion site in an AAV capsid protein that “corresponds to” an insertion site in the AAV9 capsid protein can be established by the skilled person by known methods, preferably by aligning the amino acids of the capsid proteins. In some embodiments, the insertion site of the targeting peptide corresponds to amino acid position 588 of the AAV9 VP1 capsid protein. In some embodiments, the insertion site of the targeting peptide corresponds to amino acid position 589 of the AAV9 VP1 capsid protein.

[0211] The insertion site can be any one of those described in WO2019/207132, incorporated by reference in its entirety herein. Some of the insertion sites are provided below in Table 1 and highlighted in FIGS. 3A-3C and FIGS. 4A-4D. In Table 1, the preferred insertion sites are indicated by a “-” relative to wild type VP1 capsid polypeptide.

TABLE 1
Exemplary insertion sites

| | Insertion sites 1 | | Insertion sites 2 | |
|---|---|---|---|---|
| AAV1 | D590 P591 | STD-PAT | S588 T589 | SSS-TDP |
| AAV2 | R588 Q589 | GNR-QAA | N587 R588 | RGN-RQA |
| AAV3b | S586 S587 | LQS-SNT | N588 T589 | SSN-TAP |
| AAV4 | S584 N585 | DQS-NSN | S586 N587 | SNS-NLP |
| AAV5 | S575 S576 | NQS-STT | T577 T578 | SST-TAP |
| AAV6 | D590 P591 | STD-PAT | S588 T589 | SSS-TDP |
| AAV7 | N589 T590 | AAN-TAA | | |
| AAV8 | N590 T591 | QQN-TAP | | |
| AAV9 | Q588 A589 | SAQ-AQA | | |
| AAVrh10 | N590 A591 | QQN-AAP | | |
| AAVpo.1 | N567 S568 | NQN-SNT | N569 T570 | NSN-THP |
| AAV12 | N592 A593 | NQN-ATT | T594 T595 | NAT-TAP |

[0212] 6.2.5. Various Embodiments of Modified AAV Capsid Proteins

[0213] The present disclosure provides various embodiments of modified AAV capsid proteins. In one aspect, the modified AAV capsid protein comprises (i) a reference AAV capsid protein, and (ii) a 7-mer peptide having the sequence RGDLLLS (SEQ ID NO: 1) inserted into a site within VR VIII of the reference AAV capsid protein.

[0214] In some embodiments, the modified AAV capsid protein is an AAV9 capsid protein containing a targeting peptide, RGDLLLS (SEQ ID NO: 1), inserted into the VR VIII. In one embodiment, the modified AAV capsid protein has a sequence of SEQ ID NO: 158. In some embodiments, the modified AAV capsid protein has the amino acids 138 to 736 of SEQ ID NO: 158. In some embodiments, the modified AAV capsid protein has the amino acids 203 to 736 of SEQ ID NO: 158.

[0215] In some embodiments, the modified AAV capsid protein has a sequence having at least 90%, 91%, 92%, 93%, 94%, 95%, 96%, 97%, 98%, or 99% identity to SEQ ID NO: 158.

[0216] In another aspect, the present disclosure provides a modified AAV capsid protein comprising (i) a liver-toggle mutant of a reference AAV capsid protein, comprising a) an alanine (A) amino acid residue at an amino acid position corresponding to position 266 in Anc80; or b) a lysine (K) amino acid residue at an amino acid position corresponding to position 168 in Anc80; and (ii) a targeting peptide inserted into a site within VR VIII of the liver-toggle mutant.

[0217] In one embodiment, the modified AAV capsid protein is an AAV9 capsid protein containing a targeting peptide, RGDLLLS (SEQ ID NO: 1), inserted into the VR VIII and a liver-toggle mutation. In one embodiment, the modified AAV capsid protein has a sequence of SEQ ID NO: 159. In some embodiments, the modified AAV capsid protein has the amino acids 138 to 736 of SEQ ID NO: 159. In some embodiments, the modified AAV capsid protein has the amino acids 203 to 736 of SEQ ID NO: 159.

[0218] In some embodiments, the modified AAV capsid protein has a sequence having at least 90%, 91%, 92%, 93%, 94%, 95%, 96%, 97%, 98%, or 99% identity to SEQ ID NO: 159.

[0219] A modified AAV capsid protein of the present disclosure can change the tropism, specificity and/or bio-distribution of an AAV comprising the modified AAV capsid protein. In preferred embodiments, an AAV comprising the modified AAV capsid protein has increased targeting to a target cell, tissue or organ when administered to a subject. In some embodiments, an AAV comprising the modified AAV capsid protein has decreased distribution outside of a target cell, tissue or organ when administered to a subject.

### 6.3. Polynucleotides Encoding Modified AAV Capsid Proteins; Vectors; Host Cells

[0220] In another aspect, the present disclosure provides a polynucleotide encoding a modified AAV capsid protein described herein. In some embodiments, the polynucleotide is codon optimized for expression in a bacterial or mammalian cell.

[0221] In some embodiments, the polynucleotide is inserted into an expression vector. In some embodiments, the polynucleotide is operably linked to a promoter or a sequence inducing expression of a protein from the polynucleotide. The present disclosure provides a vector including the polynucleotide encoding a modified AAV capsid protein. The vector can be used for generation of the modified AAV capsid protein. In some embodiments, the vector is used to generate an AAV virion comprising the modified AAV capsid protein. In some embodiments, the vector further comprises an AAV rep protein or a fragment thereof. In some embodiments, the reference capsid protein for the modified AAV capsid protein and the rep protein are originated from an AAV of the same clade. In some embodiments, the reference capsid protein for the modified AAV capsid protein and the rep protein are originated from an AAV of different clades.

[0222] In some embodiments, the polynucleotide is transfected to a host cell. The present disclosure provides a host cell comprising the polynucleotide encoding a modified AAV capsid protein. The host cell can be a prokaryotic cell or eukaryotic cell. In some embodiments, the host cell is a mammalian cell or a yeast cell.

[0223] In some embodiments, the host cell further comprises another polynucleotide encoding an AAV protein. In some embodiments, the host cell comprises a functional rep gene; a recombinant nucleic acid vector comprising AAV inverted terminal repeats (ITRs) and an expressible polynucleotide; and sufficient helper functions to permit packaging of the recombinant nucleic acid vector into the modified AAV capsid protein.

[0224] In some embodiments, the components required for the host cell to package a recombinant nucleic acid vector in a modified AAV capsid protein are provided to the host cell in trans. In some embodiments, any one or more of the required components (e.g., a recombinant nucleic acid vector, rep sequences, cap sequences, and/or helper functions) are provided by a stable host cell which has been engineered to contain one or more of the required components using methods known to those of skill in the art. In some embodiments, such a stable host cell contains the required component(s) under the control of an inducible promoter. In some embodiments, the required component(s) is under the control of a constitutive promoter.

### 6.4. Recombinant Nucleic Acid Vector Containing an Expressible Polynucleotide

[0225] In one aspect, the present disclosure provides a recombinant nucleic acid vector containing an expressible polynucleotide. In some embodiments, the recombinant nucleic acid vector is encapsulated in the modified AAV capsid proteins disclosed herein. In some embodiments, the recombinant nucleic acid vector is encapsulated in the reference AAV capsid protein. In preferred embodiments, the expressible polynucleotide comprises a transgene (in cis or trans configuration with other viral sequences).

[0226] The transgene can be, for example, a reporter gene (e.g., beta-lactamase, beta-galactosidase (LacZ), alkaline phosphatase, thymidine kinase, green fluorescent polypeptide (GFP), chloramphenicol acetyltransferase (CAT), or luciferase, or fusion polypeptides that include an antigen tag domain such as hemagglutinin or Myc), or a therapeutic gene (e.g., genes encoding hormones or receptors thereof, growth factors or receptors thereof, differentiation factors or receptors thereof, immune system regulators (e.g., cytokines and interleukins) or receptors thereof, enzymes, RNAs (e.g., inhibitory RNAs or catalytic RNAs), or target antigens (e.g., oncogenic antigens, autoimmune antigens). In some embodiments, the modified rAAV comprises an expressible polynucleotide encoding a therapeutic tRNA, miRNA, gene editing guide RNA, or RNA-editing guide RNA.

[0227] The transgene can be selected depending, at least in part, on the particular disease or deficiency being treated. Simply by way of example, gene transfer or gene therapy can be applied to the treatment of hemophilia, retinitis pigmentosa, cystic fibrosis, leber congenital amaurosis, lysosomal storage disorders, inborn errors of metabolism (e.g., inborn errors of amino acid metabolism including phenylketonuria, inborn errors of organic acid metabolism including propionic acidemia, inborn errors of fatty acid metabolism including medium-chain acyl-CoA dehydrogenase deficiency (MCAD)), cancer, achromatopsia, cone-rod dystrophies, macular degenerations (e.g., age-related macular degeneration), lipopolypeptide lipase deficiency, familial hypercholesterolemia, spinal muscular atrophy, Duchenne's muscular dystrophy, Alzheimer's disease, Parkinson's disease, obesity, inflammatory bowel disorder, diabetes, congestive heart failure, hypercholesterolemia, hearing loss, coronary heart disease, familial renal amyloidosis, Marfan's syndrome, fatal familial insomnia, Creutzfeldt-Jakob disease, sickle-cell disease, Huntington's disease, fronto-temporal lobar degeneration, Usher syndrome, lactose intolerance, lipid storage disorders (e.g., Niemann-Pick disease, type C), Batten disease, choroideremia, glycogen storage disease type II (Pompe disease), ataxia telangiectasia (Louis-Bar syndrome), congenital hypothyroidism, severe combined immunodeficiency (SCID), and/or amyotrophic lateral sclerosis (ALS). A transgene also can be, for example, an immunogen that is useful for immunizing a subject (e.g., a human, an animal (e.g., a companion animal, a farm animal, an endangered animal). For example, immunogens can be obtained from an organism (e.g., a pathogenic organism) or an immunogenic portion or component thereof (e.g., a toxin polypeptide or a by-product thereof). By way of example, pathogenic organisms from which immunogenic polypeptides can be obtained include viruses (e.g., picornavirus, enteroviruses, orthomyxovirus, reovirus, retrovirus), prokaryotes (e.g., Pneumococci, Staphylococci, Listeria, Pseudomonas), and eukaryotes (e.g., amebiasis, malaria, leishmaniasis, nematodes). It would be understood that the methods described herein and compositions produced by such methods are not to be limited by any particular transgene.

### 6.4.1. MTM1 Transgene

[0228] In certain embodiment, the transgene is the MTM1 transgene for treatment of subjects (preferably human subjects) suffering from XLMTM and/or carrying mutations in the MTM1 gene. “Treatment” of MTM encompasses a complete reversal or cure of the disease, or any range of improvement in conditions and/or adverse effects attributable to MTM. Merely to illustrate, “treatment” of MTM includes an improvement in any of the following effects associated with MTM or combination thereof: short life expectancy, respiratory insufficiency (partially or completely), poor muscle tone, drooping eyelids, poor strength in proximal muscles, poor strength in distal muscles, facial weakness with or without eye muscle weakness, abnormal curvature of the spine, joint deformities, and weakness in the muscles that control eye movement (ophthalmoplegia). Improvements in any of these conditions can be readily assessed according to standard methods and techniques known in the art.

[0229] A modified rAAV of the present disclosure can be administered to a subject in a suitable pharmaceutical carrier, e.g., as described herein.

[0230] The rAAV of the disclosure are typically administered in sufficient amounts to transduce or infect the desired cells and to provide sufficient levels of gene transfer and expression to provide a therapeutic benefit to subjects suffering from XLMTM or carrying a mutation in the MTM1 gene, without undue adverse effects.

[0231] Transduction and/or expression of the MTM1 transgene can be monitored at various time points following administration by DNA, RNA, or protein assays.

[0232] The MTM1 transgene can encode an MTM1 polypeptide, i.e., a polypeptide comprising the amino acid sequence of MTM1 or a functional fragment or a functional variant thereof.

[0233] The structure and various motifs of the MTM1 polypeptide have been well characterized in the art (see, e.g., Laporte et al, 2003, Human Molecular Genetics, 12(2):R285-R292; Laporte et al., 2002, Journal of Cell Science 15:3105-3117; Lorenzo et al., 2006, Journal of Cell Science 119:2953-2959). As such, in certain embodiments, various functional fragments or variants of the MTM1 polypeptides can be designed and identified by screening polypeptides made, for example, recombinantly from the corresponding fragment of the nucleic acid encoding an MTM1 polypeptide. For example, several domains of MTM1 have been shown to be important for its phosphatase activity or localization. To illustrate, these domains include: Glucosyltransferase, Rab-like GTPase Activator and Myotubularins (GRAM; amino acid positions 29-97 or up to 160 of SEQ ID NO:165), Rac-Induced recruitment Domain (RID; amino acid positions 161-272 of SEQ ID NO: 165), PTP/DSP homology (amino acid positions 273-471 of SEQ ID NO: 165; catalytic cysteine is amino acid 375 of SEQ ID NO: 165), and SET-interacting domain (SID; amino acid positions 435-486 of SEQ ID NO: 165). Accordingly, any combination of such domains may be constructed to identify fragments or variants of MTM1 that exhibit a biologically activity of native MTM1.

[0234] Exemplary functional fragments of an MTM1 polypeptide include fragments comprising amino acids 29-486 of SEQ ID NO:165 (i.e., the amino acid sequence of SEQ ID NO: 164). Thus, in certain embodiments, the MTM1 polypeptides comprise amino acid residues 29-486 of SEQ ID NO:165 or the amino acid sequence of SEQ ID NO:164.

[0235] In some embodiments, the MTM1 polypeptide comprises an amino acid sequence having at least 90%, at least 95%, at least 98%, at least 99% or 100% identity to a functional fragment of human MTM1 having the amino acid sequence of SEQ ID NO:164. In some embodiments, the MTM1 polypeptide is a full length MTM1 polypeptide (e.g., a polypeptide of SEQ ID NO:165).

[0236] In other embodiments, the MTM1 polypeptide is a fusion polypeptide comprising an amino acid sequence having at least at least 90%, at least 95%, at least 98%, at least 99% or 100% identity to SEQ ID NO:164 fused to another polypeptide portion, e.g., one or more polypeptide portions that enhance one or more of in vivo stability, in vivo half-life, uptake/administration, and/or purification. In some embodiments, the polypeptide portion is an internalizing moiety.

[0237] In some embodiments, the MTM1 coding sequence comprises a nucleotide sequence having at least 80% sequence identity to SEQ ID NO:166, which is of the native MTM1 coding sequence, or a portion thereof encoding a functional fragment of wild type MTM1, e.g., the functional fragment corresponding to amino acids 29-486 of MTM1 (SEQ ID NO:164). In certain embodiments, the MTM1 coding sequence comprises a nucleotide sequence at least 80%, at least 85%, at least 90%, at least 95%, at least 97%, at least 98%, at least 99% or 100% identical to SEQ ID NO: 166 or a portion thereof encoding a functional fragment of wild type MTM1, e.g., the functional fragment corresponding to amino acids 29-486 of MTM1 (SEQ ID NO:164).

[0238] In other embodiments, the MTM1 coding sequence comprises a nucleotide sequence having at least 80% sequence identity to any of SEQ ID NOs:167, 168 and 169, which are codon-optimized for expression in human cells, or to a portion of any of SEQ ID NOs:167, 168 and 169 encoding a functional fragment of wild type MTM1, e.g., the functional fragment corresponding to amino acids 29-486 of MTM1 (SEQ ID NO:164). In certain embodiments, the MTM1 coding sequence comprises a nucleotide sequence at least 80%, at least 85%, at least 90%, at least 95%, at least 97%, at least 98%, at least 99% or 100% identical to any one of SEQ ID NOs:167, 168 and 169, or to or to a portion of any of SEQ ID NOs:167, 168 and 169 encoding a functional fragment of wild type MTM1, e.g., the functional fragment corresponding to amino acids 29-486 of MTM1 (SEQ ID NO:164).

[0239] In some embodiments, the MTM1 coding sequence may further comprise a nucleotide sequence that encodes a linker and/or an internalizing moiety. In some embodiments, the internalizing moiety is an antibody or an antigen-binding fragment thereof.

### 6.4.2. Regulatory Sequences

[0240] The recombinant nucleic acid vector of the disclosure typically comprise regulatory sequences operably linked to expressible polynucleotide (e.g., the MTM1 coding sequence). The regulatory sequence will generally be appropriate for a cell to be transduced with the expressible polynucleotide (e.g., MTM1 coding sequence), such as skeletal muscle cells. Numerous types of regulatory sequence and are known the art and may include, but are not limited to, promoter sequences, leader or signal sequences, ribosomal binding sites, transcriptional start and termination sequences, translational start and termination sequences, and enhancer or activator sequences.

[0241] In some embodiments, the regulatory sequence includes expression regulatory elements (EREs), e.g., EREs comprising a promoter and optionally an enhancer. The promoter is a major DNA regulatory element in the rAAV genome that determines the level of the expressible polynucleotide (e.g., MTM1 coding sequence) expression and in which cells it will be expressed. The choice of promoter is therefore a key aspect of the design of AAV vectors. Furthermore, the size of the promoter is also relevant as AAVs have a maximum packaging capacity of ˜4700 nucleotides.

[0242] In some embodiments, the promoter is a constitutive promoter. In other embodiments, the promoter is a tissue-specific (e.g., muscle-specific) promoter. In yet other embodiments, the promoter is an inducible promoter.

[0243] Other suitable features of the rAAV include ITR sequences (e.g., wild type ITRs or a combination of wild type ITR sequences and an ITR sequence lacking a functional terminal resolution site, for example as set forth in SEQ ID NO: 178 and SEQ ID NO: 179), a intron (e.g., a chimeric intron comprising human herpesvirus beta and human globin 3 intronic sequences, for example as set forth in SEQ ID NO: 176), a splice acceptor sequence 5′ of the MTM1 coding sequence (e.g., a human globin 3 splice acceptor sequence, for example as set forth in SEQ ID NO:180), a polyadenylation sequence (e.g., a rabbit globin polyadenylation sequence, for example as set forth in SEQ ID NO: 177).

### 6.4.2.1 CAG Promoters

[0244] Certain embodiments of the present disclosure are based in part on the discovery that an ERE comprising a CAG promoter can drive far greater expression levels of the expressible polynucleotide (e.g., MTM1 coding sequence) than the desmin promoter in clinical development. Without being bound by theory, it is believed the rAAV with the MTM1 coding sequence under the control of the CAG promoter can be therapeutically effective at lower doses than corresponding vectors in which the MTM1 coding sequence is under the control of the desmin promoter, and thus such vectors are believed to have improved therapeutic indexes as compared to corresponding vectors in which the MTM1 coding sequence is under the control of the desmin promoter.

[0245] Accordingly, the present disclosure provides rAAV comprising an expressible polynucleotide operably linked to an ERE comprising a CAG promoter (referred to as a “CAG ERE” for convenience). In some embodiments, the expressible polynucleotide is an MTM1 coding sequence.

[0246] In some embodiments, the CMV enhancer component of the CAG promoter or ERE comprises a sequence having at least 90%, at least 95%, at least 98%, at least 99% or 100% sequence identity to SEQ ID NO:171.

[0247] In some embodiments, the chicken beta actin promoter component of the CAG promoter or ERE comprises a nucleotide sequence having at least 90%, at least 95%, at least 98%, at least 99% or 100% sequence identity to SEQ ID NO:172.

[0248] In some embodiments, the CAG promoter or ERE comprises a nucleotide sequence having at least 90%, at least 95%, at least 98%, at least 99% or 100% sequence identity to SEQ ID NO:173.

[0249] An exemplary CAG ERE is used in the rAVE expression cassette (GeneDetect.com).

[0250] In some embodiments, the CAG ERE further comprises a chimeric intron, for example a chimeric intron formed from introns from the human betaherpes virus and rabbit beta globin. In some embodiments, the chimeric intron comprises a nucleotide sequence having at least 90%, at least 95%, at least 98%, at least 99% or 100% sequence identity to SEQ ID NO:174.

[0251] Further modifications of the CAG promoter can be used in the rAAV of the disclosure. For example, the intron in the 5′ untranslated region (UTR) of the CAG promoter can be truncated to accommodate larger inserts (Richardson et al., 2009, PLoS One, 4(4), e5308. doi: 10.1371/joumal.pone.0005308). Deletions in intron A of the hCMV promoter can also result in enhanced expression (Quilici et al., 2013, Biotechnol Lett. 35(1), 21-27. doi: 10.1007/s10529-012-1043-z). Thus, a person skilled in the art could modify the CAG ERE or promoter sequences without compromising the high MTM1 expression levels observed with the constructs disclosed in Example 7.

[0252] 6.4.2.2 Other Promoters

[0253] The rAAV of the disclosure may comprise, in lieu of a CAG ERE, an ERE comprising another constitutive promoter or a tissue specific or inducible promoter. Promoters that drive lower expression levels than a CAG promoter may be combined with other features that increase transgene expression (e.g., using codon optimized coding sequences) and/or reduce off target tropism of the virus (e.g., using muscle targeting and/or liver toggle capsid proteins).

[0254] In various embodiments the promoter is a constitutive, tissue-specific (e.g., muscle-specific) or inducible promoter. The promoters may be either naturally occurring promoters, or hybrid promoters that combine elements of more than one promoter.

[0255] Examples of constitutive promoters include, without limitation, a retroviral Rous sarcoma virus (RSV) LTR promoter (optionally with an RSV enhancer), a cytomegalovirus (CMV) promoter (optionally with a CMV enhancer), a SV40 promoter, a dihydrofolate reductase promoter, a β-actin promoter, a phosphoglycerol kinase (PGK) promoter, and a EF1α promoter.

[0256] Examples of tissue-specific promoters include, without limitation a synapsin-1 (Syn) promoter, a creatine kinase (MCK) promoter, a mammalian desmin (DES) promoter, an α-myosin heavy chain (a-MHC) promoter, or a cardiac Troponin T (cTnT) promoter.

[0257] Examples of inducible promoters include a zinc-inducible metallothionine (MT) promoter, a dexamethasone (Dex)-inducible mouse mammary tumor virus (IMMTV) promoter, a tetracycline-inducible promoter, or a rapamycin-inducible promoter.

### 6.5. Modified AAV Virions

[0258] The present disclosure further provides a modified recombinant AAV (rAAV) virion comprising a modified AAV capsid protein described herein. In some embodiments, the modified rAAV comprises a modified AAV capsid protein and a recombinant nucleic acid vector.

[0259] In some embodiments, the modified rAAV comprising a modified AAV capsid protein achieves higher infection of a target following administration to a mammalian subject as compared to an rAAV comprising a corresponding reference AAV capsid protein. In some embodiments, the modified rAAV achieves higher expression in a target of an expressible polynucleotide within the recombinant nucleic acid vector following administration to a mammalian subject when compared to expression of the expressible polynucleotide administered in an rAAV comprising a corresponding reference AAV capsid protein.

[0260] In some embodiments, the modified rAAV comprising a modified AAV capsid protein achieves lower infection of an off-target following administration to a mammalian subject as compared to an rAAV comprising a corresponding reference AAV capsid protein. In some embodiments, the modified rAAV achieves lower expression in an off-target of an expressible polynucleotide within the recombinant nucleic acid vector following administration to a mammalian subject as compared to expression of the expressible polynucleotide administered in an rAAV comprising a corresponding reference AAV capsid protein. In typical embodiments, the corresponding reference AAV capsid protein is a capsid protein identical to the modified AAV capsid protein except that it does not include a targeting peptide and/or a liver-toggle mutation described above.

[0261] In some embodiments, the target is brain, muscle, spinal cord, eye, liver, muscle, or other organ. In some embodiments, the off-target tissue is brain, muscle, spinal cord, eye, liver, muscle, or other organ. In one embodiment, the target is muscle.

[0262] In some embodiments, the modified rAAV has less liver toxicity than an rAAV comprising a corresponding reference AAV capsid protein administered by the same route of administration and in the same dose. In some embodiments, the less liver toxicity is because of de-targeting of the modified rAAV to a liver.

### 6.6. Methods of Producing rAAV

[0263] The rAAV of the disclosure comprise a recombinant nucleic acid vector containing an expressible polynucleotide. In some embodiments, the expressible polynucleotide is operably linked to an ERE. The expressible polynucleotide and ERE optionally replace the AAV genomic coding region (e.g., replace the AAV rep and cap genes). The expressible polynucleotide and ERE are generally flanked on either side by AAV inverted terminal repeat (ITR) regions, although a single ITR may be sufficient to carry out the functions normally associated with configurations comprising two ITRs (see, for example, WO 94/13788), and vector constructs with only one ITR can thus be employed in conjunction with the rAAV of the present disclosure.

[0264] In some embodiments, the rAAV of the disclosure comprise an MTM1 coding sequence operably linked to an ERE. The MTM1 coding sequence and ERE optionally replace the AAV genomic coding region (e.g., replace the AAV rep and cap genes).

[0265] In order to replicate and package the vector, the missing functions are complemented with a packaging gene, or a plurality thereof, which together encode the necessary functions for the various missing rep and/or cap gene products. The packaging genes or gene cassettes are in one embodiment not flanked by AAV JTRs and in one embodiment do not share any substantial homology with the rAAV genome.

[0266] The rAAV vector construct, and the complementary packaging gene constructs can be implemented in a number of different forms. Viral particles, plasmids, and stably transformed host cells can all be used to introduce such constructs into the packaging cell, either transiently or stably.

[0267] In certain embodiments of this invention, the AAV vector and complementary packaging gene(s), if any, are provided in the form of bacterial plasmids, AAV particles, or any combination thereof. In other embodiments, either the AAV vector sequence, the packaging gene(s), or both, are provided in the form of genetically altered (preferably inheritably altered) eukaryotic cells. The development of host cells inheritably altered to express the AAV vector sequence, AAV packaging genes, or both, provides an established source of the material that is expressed at a reliable level.

[0268] A variety of different genetically altered cells can thus be used in the context of this invention. By way of illustration, a mammalian host cell may be used with at least one intact copy of a stably integrated rAAV vector. An AAV packaging plasmid comprising at least an AAV rep gene operably linked to a promoter can be used to supply replication functions (as described in U.S. Pat. No. 5,658,776). Alternatively, a stable mammalian cell line with an AAV rep gene operably linked to a promoter can be used to supply replication functions (see, e.g., WO 95/13392; WO 98/23018; and U.S. Pat. No. 5,656,785). The AAV cap gene, providing the encapsidation proteins as described above, can be provided together with an AAV rep gene or separately (see, e.g., the above-referenced patent documents as well as WO 98/27204.

[0269] Thus, the rAAV of the disclosure can be assembled by, for example, expression of its components in a packaging host cell. The components of a virus particle (e.g., rep sequences, cap sequences, inverted terminal repeat (ITR) sequences) can be introduced into a packaging host cell using one or more viral vectors.

[0270] Once assembled, rAAV particles can be purified, if desired, using routine methods. As used herein, “purified” virus particles refer to virus particles that are removed from components in the mixture in which they were made such as, but not limited to, viral components (e.g., rep sequences, cap sequences), packaging host cells, and partially- or incompletely-assembled virus particles.

### 6.7. Pharmaceutical Composition Comprising Modified rAAV

[0271] In one aspect, the present disclosure provides a pharmaceutical composition comprising a modified AAV capsid protein or a modified rAAV of the present disclosure and a pharmaceutically acceptable carrier. The modified rAAV can comprise a modified AAV capsid protein as described herein and a recombinant nucleic acid vector containing an expressible polynucleotide.

[0272] In particular embodiments, the present disclosure provides a pharmaceutical composition comprising an rAAV whose genome comprising an MTM1 coding sequence operably linked to an expression regulatory element (ERE); and one, two or all three of the following features: (a) the ERE is a hybrid expression regulatory element (ERE) comprising a CMV enhancer and a chicken beta actin promoter operably linked to the MTM1 coding sequence; and/or (b) the rAAV comprises a modified AAV capsid protein comprising at least one liver-toggle mutation and/or one muscle-targeting element; and/or (c) the MTM1 coding sequence is codon optimized for expression in human cells, optionally wherein the coding sequence has at least 90%, at least 95%, at least 98% or at least 99% sequence identity to any one of SEQ ID NOS:167 to 170.

[0273] The pharmaceutical composition can be used to deliver the recombinant nucleic acid vector to a target within a mammalian subject. When the pharmaceutical composition is administered, the modified rAAV can achieve a higher infection of target cells following administration to a mammalian subject as compared to an rAAV comprising a corresponding reference AAV capsid protein administered by the same route of administration and in the same dose. In some embodiments, the modified rAAV achieves higher expression in target cells of an expressible polynucleotide within the recombinant nucleic acid genome following administration to a mammalian subject as compared to the expressible polynucleotide administered in an rAAV comprising a corresponding reference AAV capsid protein administered by the same route of administration and in the same dose.

[0274] The pharmaceutical composition can be formulated using one or more carriers, excipients, stabilizers and adjuvants to, for example: (1) increase stability; (2) increase cell transfection or transduction; (3) permit the sustained or delayed release; (4) alter the biodistribution (e.g., target the rAAV particle to specific tissues or cell types); (5) increase the translation of encoded protein in vivo; and/or (6) alter the release profile of encoded protein in vivo.

[0275] Formulations of the pharmaceutical compositions provided herein can include, without limitation, saline, which may be formulated with a variety of buffering solutions (e.g., phosphate buffered saline), lactose, sucrose, calcium phosphate, gelatin, dextran, agar, pectin, water, lipidoids, liposomes, lipid nanoparticles, polymers, lipoplexes, core-shell nanoparticles, peptides, proteins, nanoparticle mimics and combinations thereof.

[0276] Formulations of the pharmaceutical compositions described herein can be prepared by any method known or hereafter developed in the art of pharmacology. In general, such preparatory methods include the step of associating the active ingredient with a carrier and/or one or more other accessory ingredients (e.g., excipients, stabilizers and adjuvants).

[0277] A pharmaceutical composition in accordance with the present disclosure can be prepared, packaged, and/or sold in bulk, as a single unit dose, and/or as a plurality of single unit doses. As used herein, a unit dose refers to a discrete amount of the pharmaceutical composition including a predetermined amount of the active ingredient. The amount of the active ingredient is generally equal to the dosage of the active ingredient which would be administered to a subject and/or a convenient fraction of such a dosage such as, for example, one-half or one-third of such a dosage.

[0278] Relative amounts of the active ingredient (e.g., rAAV), the pharmaceutically acceptable carrier, and/or any additional ingredients in a pharmaceutical composition in accordance with the present disclosure can vary, depending upon the identity, size, and/or condition of the subject being treated and further depending upon the route by which the composition is to be administered.

[0279] Various carriers, excipients, stabilizers and adjuvants for formulating pharmaceutical compositions and techniques for preparing the composition are known in the art (see Remington: The Science and Practice of Pharmacy, 22nd Revised Ed., Pharmaceutical Press, 2012; incorporated herein by reference in its entirety). The use of suitable conventional carriers, excipients, stabilizers and adjuvants is contemplated within the scope of the present disclosure.

[0280] In some embodiments, the pharmaceutical composition is in the form of a solution containing concentrations of from about 1×101 to about 1×1016 genome copies (GCs)/ml of rAAV (e.g., a solution containing concentrations of from about 1×103 to about 1×1014 GCs/ml).

[0281] 6.7.1. Routes of Administration

[0282] A modified rAAV of the present disclosure can be administered to a subject (e.g., a human or non-human mammal) in a suitable carrier. Suitable carriers include saline, which may be formulated with a variety of buffering solutions (e.g., phosphate buffered saline), lactose, sucrose, calcium phosphate, gelatin, dextran, agar, pectin, and water. A modified rAAV typically is administered in sufficient amounts to transduce or infect the desired cells and to provide sufficient levels of gene transfer and expression to provide a therapeutic benefit without undue adverse effects. Conventional and pharmaceutically acceptable routes of administration include, but are not limited to, direct delivery to an organ such as, for example, the muscle, liver or lung, orally, intranasally, intratracheally, intrathecally, intravenously, intramuscularly, intraocularly, subcutaneously, intradermally, or by other routes of administration. Routes of administration can be combined, if desired.

[0283] 6.7.2. Dosages

[0284] The dose of a viral vector administered to a subject will depend primarily on factors such as the condition being treated, and the age, weight, and health of the subject. For example, a therapeutically effective dosage of a viral vector to be administered to a human subject generally is in the range of from about 0.1 ml to about 10 ml of a solution containing concentrations of from about 1×10¹ to about 1×10¹⁶ genome copies (GCs)/ml of viruses (e.g., a solution containing concentrations of from about 1×10³ to about 1×10¹⁴ GCs/ml). In some embodiments, the total dose of the rAAV administered to a subject is less than 3×10¹⁴ GCs, e.g., 1×10¹⁴ GCs or less, 5×10¹³ GCs or less, 1×10¹³ GCs or less, 5×10¹² GCs or less, or 1×10¹² GCs or less.

[0285] In another embodiment, a therapeutically effective dosage of a viral vector to be administered to a human subject generally is in the range of from about 0.1 ml to about 10 ml of a solution containing concentrations of from about 1×10¹ to 1×10¹² genome copies (GCs) of viruses (e.g., about 1×10³ to 1×10⁹ GCs). Transduction and/or expression of a transgene can be monitored at various time points following administration by DNA, RNA, or protein assays. In some instances, the levels of expression of the transgene can be monitored to determine the frequency and/or amount of dosage. Dosage regimens similar to those described for therapeutic purposes also may be utilized for immunization.

[0286] 6.7.3. Targeting

[0287] Targeting of modified rAAVs can be tested in an experimental animal by measuring rAAV infection or expression of an expressible polynucleotide. In some embodiments, targeting is measured in a non-human primate (NHP), mice, rats, birds, rabbits, guinea pigs, hamsters, farm animals (including pigs and sheep), dogs, or cats.

[0288] Targeting of modified rAAVs can be measured after systemic or local administration of rAAVs. In some embodiments, targeting of modified rAAVs is measured after intravenous infusion of rAAVs.

[0289] 6.7.3.1 RNA Data—Muscle:Liver Infection Ratio

[0290] In some embodiments, targeting of modified rAAVs is measured by measuring the ratio between the copy numbers of the transgene transcripts and housekeeping gene (e.g., RPP30) transcripts. In a particular embodiment, the transcripts are measured by RT-ddPCR. In some embodiments, the ratio is measured after a first administration into a mammal, e.g., a mouse, or a non-human primate such as a marmoset or rhesus macaque.

[0291] In some embodiments, a muscle:liver infection ratio (RNA) is measured by comparing the ratios between the copy numbers of the transgene transcripts and housekeeping gene (e.g., RPP30) transcripts in the two different organs (e.g., muscle v. liver).

$$muscle : liver infection ratio ( RNA ) = \frac{( \frac{transgene transcripts}{housekeeping transcrits} ) in muscle}{( \frac{transgene transcripts}{housekeeping transcrits} ) in liver}$$

[0292] In some embodiments, modified rAAV of the present disclosure provides a (transgene transcripts/housekeeping transcripts) ratio in liver of less than 1000, less than 900, less than 800, less than 700, less than 600, less than 500, less than 400, less than 300, less than 200, less than 100, less than 90, less than 80, less than 70, less than 60, less than 50, less than 40, less than 30, less than 20, or less than 10.

[0293] In certain embodiments, when the (transgene transcripts/housekeeping transcripts) in the liver is zero or below detection limits, the muscle:liver infection ratio is reported as >10,000 by convention.

[0294] In some embodiments, the modified rAAV of the present disclosure provides a muscle:liver infection ratio (RNA) of at least 10, at least 15, at least 20, at least 25, at least 30, at least 35, at least 40, at least 45, at least 50, at least 55, at least 60, at least 65, at least 70, at least 75, at least 80, at least 85, at least 90, at least 95, at least 100, at least 150, at least 200, at least 500, at least 1000. In some embodiments, the muscle is triceps surae, biceps, heart or quadricep.

[0295] In some embodiments, modified rAAV of the present disclosure provides a muscle:liver infection ratio (RNA) of 1 to 10, 1 to 100, 10 to 20, 10 to 50, 10 to 80, 10 to 100, 20 to 100, 100 to 500, 100 to 1000, or 500 to 1000. In some embodiments, the muscle is triceps surae, bicep, heart or quadricep.

[0296] 6.7.3.2 DNA Data—Muscle:Liver Infection Ratio

[0297] In some embodiments, targeting of modified rAAVs is measured by measuring the ratio between the copy numbers of the transgene DNA genomes to copy numbers of host genes or genetic loci (e.g., RPP30). In a particular embodiment, the genomes are measured by RT-ddPCR. In some embodiments, the ratio is measured after a first administration into a mammal, e.g., a mouse, or a non-human primate such as a marmoset or rhesus macaque.

[0298] In some embodiments, a muscle:liver infection ratio (DNA) is measured by comparing the ratios between the copy numbers of the transgene DNA genomes and housekeeping gene (e.g., RPP30) genomes in the two different organs (e.g., muscle v. liver).

$$muscle : liver infection ratio ( DNA ) = \frac{( \frac{transgene DNA genomes}{housekeeping genomes} ) in muscle}{( \frac{transgene DNA genomes}{housekeeping genomes} ) in liver}$$

[0299] In some embodiments, modified rAAV of the present disclosure provides a (transgene genomes/housekeeping genomes) ratio in liver of less than 1, or in a range from 1 to 10, 1 to 5, 1 to 2, 0.1 to 1, 0 to 1, 0.01 to 0.1, 0.01 to 0.5, or 0.01 to 0.05.

[0300] In certain embodiments, when the (transgene genomes/housekeeping genomes) in the liver is zero or below detection limits, the muscle:liver infection ratio is reported as >10,000 by convention.

[0301] In some embodiments, the modified rAAV of the present disclosure provides a muscle:liver infection ratio (DNA) of at least 1, at least 1.5, at least 2, at least 2.5, at least 3, at least 3.5, at least 4, at least 4.5, at least 5, at least 5.5, at least 6, at least 6.5, at least 7, at least 7.5, at least 8, at least 8.5, at least 9, at least 9.5, at least 10, at least 11, at least 12, at least 13, at least 14, at least 15, at least 16, at least 17, at least 18, at least 19, at least 20, at least 30, at least 40, at least 50, at least 60, at least 70, at least 80, at least 90, at least 100, at least 150, at least 200, at least 500, at least 1,000 or at least 10,000. In some embodiments, the muscle is triceps surae, biceps, heart or quadricep.

[0302] In some embodiments, modified rAAV of the present disclosure provides a muscle:liver infection ratio (DNA) in the range of 0.5 to 1, 0.5 to 5, 0.5 to 10, 1 to 10, 1 to 100, 2 to 8, 5 to 10, 10 to 20, 20 to 80, 10 to 50, 10 to 100, 50 to 80, 100 to 500, 100 to 1000, or 500 to 1000. In some embodiments, the muscle is triceps surae, biceps, heart, or quadricep. In some embodiments, the modified rAAV achieves a muscle:liver infection ratio (DNA) of at least 2, at least 5, at least 10, at least 20, at least 30, at least 40, at least 50, at least 60, at least 70, at least 80, at least 90, at least 100, at least 150, at least 200, at least 500, at least 1000. In some embodiments, the modified rAAV achieves a muscle:liver infection ratio of 0.1 to 1, 1 to 5, 1 to 10, 1 to 20, 1 to 50, 1 to 100, 1 to 200, 1 to 300, 100 to 500, 250 to 750, or 500 to 1000.

[0303] 6.7.3.3 IHC data Muscle:Liver Infection Ratio

[0304] In some embodiments, targeting of modified rAAVs is calculated using the % of cells that have been successfully transduced and express a transgene in a tissue (e.g., eGFP). In a particular embodiment, the transgene expression is measured by immunohistochemistry. In some embodiments, the ratio is measured after a first administration into a mammal, e.g., a mouse, or a non-human primate such as a marmoset or rhesus macaque.

[0305] In some embodiments, a muscle:liver infection ratio (IHC) is measured by comparing the ratios between the transgene % GFP+cells and housekeeping gene (e.g., RPP30) % GFP+cells in the two different organs (e.g., muscle v. liver).

$$muscle : liver infection ratio ( IHC ) = \frac{( \frac{transgene \% GFP + cells}{housekeeping \% GFP + cells} ) in muscle}{( \frac{transgene \% GFP + cells}{housekeeping \% GFP + cells} ) in liver}$$

[0306] In some embodiments, modified rAAV of the present disclosure provides a (transgene % GFP/housekeeping % GFP) ratio in liver of less than 1, less than 5, less than 10, or in a range from 1 to 10, 1 to 5, 1 to 2, 0.1 to 1, 0 to 1, 0.01 to 0.1, 0.01 to 0.5, or 0.01 to 0.05.

[0307] In certain embodiments, when the (transgene % GFP/housekeeping % GFP) in the liver is zero or below detection limits, the muscle:liver infection ratio is reported as >10,000 by convention.

[0308] In some embodiments, the modified rAAV of the present disclosure provides a muscle:liver infection ratio (IHC) of at least 1, at least 1.5, at least 2, at least 2.5, at least 3, at least 3.5, at least 4, at least 4.5, at least 5, at least 5.5, at least 6, at least 6.5, at least 7, at least 7.5, at least 8, at least 8.5, at least 9, at least 9.5, at least 10, at least 11, at least 12, at least 13, at least 14, at least 15, at least 16, at least 17, at least 18, at least 19, at least 20, at least 30, at least 40, at least 50, at least 60, at least 70, at least 80, at least 90, at least 100, at least 150, at least 200, at least 500, at least 1000. In some embodiments, the muscle is triceps surae, biceps, heart or quadricep.

[0309] In some embodiments, modified rAAV of the present disclosure provides a muscle:liver infection ratio (IHC) of 1 to 5, 1 to 10, 1 to 100, 2 to 8, 10 to 20, 20 to 30, 10 to 50, 10 to 100, 20 to 80, 50 to 80, 100 to 500, 100 to 1000, or 500 to 1000. In some embodiments, the muscle is triceps surae, bicep, heart or quadricep.

### 6.8. Method of Use

[0310] A modified rAAV as described herein can be used in research and/or therapeutic applications. In some embodiments, a modified rAAV is for genetically modifying a cell in vitro or in vivo. In some embodiments, a modified rAAV is used for gene therapy or for vaccination in a human or animal. More specifically, a modified rAAV can be used for gene addition, gene augmentation, genetic delivery of a polypeptide therapeutic, genetic vaccination, gene silencing, genome editing, gene therapy, RNAi delivery, cDNA delivery, mRNA delivery, miRNA delivery, miRNA sponging, genetic immunization, optogenetic gene therapy, transgenesis, DNA vaccination, or DNA immunization of liver cells or non-liver cells.

[0311] In some embodiments, a modified rAAV of the present disclosure is used for treatment of a muscle disease. In some embodiments, the disease is a muscular disease and/or the condition is muscle degeneration. In some embodiments, said muscular disease is a muscular dystrophy, a cardiomyopathy, a myotonia, a muscular atrophy, a myoclonus dystonia, a mitochondrial myopathy, a rhabdomyolysis, a fibromyalgia, and/or a myofascial pain syndrome. In some embodiments, the modified rAAV is used to deliver the rAAV to a striated muscle, preferably heart or a skeletal muscle or diaphragm.

[0312] In some embodiments, the rAAVs or pharmaceutical compositions described are useful in the treatment of subjects (preferably human subjects) suffering from XLMTM and/or carrying mutations in the MTM1 gene. “Treatment” of MTM encompasses a complete reversal or cure of the disease, or any range of improvement in conditions and/or adverse effects attributable to MTM. Merely to illustrate, “treatment” of MTM includes an improvement in any of the following effects associated with MTM or combination thereof: short life expectancy, respiratory insufficiency (partially or completely), poor muscle tone, drooping eyelids, poor strength in proximal muscles, poor strength in distal muscles, facial weakness with or without eye muscle weakness, abnormal curvature of the spine, joint deformities, and weakness in the muscles that control eye movement (ophthalmoplegia). Improvements in any of these conditions can be readily assessed according to standard methods and techniques known in the art.

[0313] A modified rAAV of the present disclosure can be administered to a subject in a suitable pharmaceutical carrier, e.g., as described in Section 6.7.

[0314] The rAAV of the disclosure are typically administered in sufficient amounts to transduce or infect the desired cells and to provide sufficient levels of gene transfer and expression to provide a therapeutic benefit to subjects suffering from a disease. In particular embodiments, the rAAV is administered in sufficient amounts to provide a therapeutic benefit to subjects suffering from XLMTM or carrying a mutation in the MTM1 gene, without undue adverse effects.

[0315] Conventional and pharmaceutically acceptable routes of administration include, but are not limited to, direct delivery to an organ such as, for example, the muscle, liver or lung, orally, intranasally, intratracheally, intrathecally, intravenously, intramuscularly, intraocularly, subcutaneously, intradermally, or by other routes of administration. Routes of administration can be combined, if desired.

[0316] The dose of a viral vector administered to a subject will depend primarily on factors such as the age, weight, and health (e.g., disease progression) of the subject. For example, a therapeutically effective dosage of a viral vector to be administered to a human subject generally is in the range of from about 0.1 ml to about 10 ml of a solution containing concentrations of from about 1×10¹ to about 1×10¹⁶ genome copies (GCs)/ml of viruses (e.g., a solution containing concentrations of from about 1×10³ to about 1×10¹⁴ GCs/ml). In some embodiments, the total dose of the rAAV administered to a subject is less than 3×10¹⁴ GCs, e.g., 1×10¹⁴ GCs or less, 5×10¹³ GCs or less, 1×10¹³ GCs or less, 5×10¹² GCs or less, or 1×10¹² GCs or less.

[0317] Transduction and/or expression of the transgene can be monitored at various time points following administration by DNA, RNA, or protein assays.

[0318] Accordingly, the present disclosure provides a method of treating and/or preventing a muscular disease and/or muscle degeneration by administering a modified rAAV described herein.

### 7. EXAMPLES

[0319] Experiment AFT-MR0001 was designed to test the hypothesis that the peptide RGDLLLS (SEQ ID NO:1), when inserted into VR VIII to create a modified adeno-associated virus capsid protein, enhances gene delivery to skeletal muscle versus the unmodified protein. Further, the experiment was designed to test the hypothesis that the liver toggle mutation provides a structure that can determine efficiency of liver gene delivery and that the peptide insertion into VR VIII can act independently and/or synergistically. Two doses were also used, a low dose of 1×10¹³ gc/kg and a high dose of 5×10¹³ gc/kg, seeking to demonstrate possible equivalence of eGFP expression afforded by the modified AAV vector at a low dose with the eGFP expression observed with the unmodified vector at high dose. This experiment proved both hypotheses: the targeting peptide insertion into VR VIII of an adeno-associated virus VP1 protein enhances gene delivery to the muscle, and that combination with the liver-detargeting phenotype produces a vector with robust gene delivery to the muscle with the expected reduction in liver. Further, at a 5× lower dose, the level of expression between high dose unenhanced variants and matching low dose enhanced variants is not statistically significant.

### 7.1. Example 1: AAV Variants

[0320] The polynucleotide encoding the wild-type AAV9 VP1 capsid protein (SEQ ID NO: 61) or AAV^{mut1} capsid protein (SEQ ID NO: 163) was modified by inserting the 7-mer peptide RGDLLLS (SEQ ID NO: 1) between amino acid residues 588 and 589. The produced modified polynucleotides encode modified VP1 proteins referred to as: AAV^{deco1} capsid protein (SEQ ID NO: 158) or AAV^{mut1_deco1} capsid protein (SEQ ID NO: 159).

[0321] Corresponding AAV vectors were manufactured with the modified capsid proteins in the Affinia Therapeutics Vector Core via standard triple transfection into HEK293 cells. The AAV vectors produced by the method include AAV9 CAG.GFP (CAG.GFP construct encapsulated in AAV9 capsid), AAV^{mut1} CAG.GFP (CAG.GFP construct encapsulated in a capsid comprising the AAV^{mut1} capsid protein), AAV9^{deco1} CAG.GFP (CAG.GFP construct encapsulated in a capsid comprising the AAV^{deco1} capsid protein), and AAV^{mut1_deco1} CAG.GFP (CAG.GFP construct encapsulated in a capsid comprising the AAV^{mut1_deco1} capsid protein). Successful gene transfer by these vectors was detected by GFP expression in target cells. Please note that the vectors comprising a particular modified capsid protein is referred to in the Figures related to the following examples by the abbreviated term for the capsid protein itself, as will be clear from the context of the experiment.

### 7.2. Example 2: Confirmed Enhanced Muscle Tropism with Limited Liver Tropism for AAV^{mut1_deco1} in C57BL/6 Mice at Both Low and High Dosage Regimes

[0322] Gene transfer efficacy of each AAV vector prepared according to Example 1 was tested with three C57BL/6 mice, injected with one of the vectors at one of the two different doses by intravenous tail vein injection. Total twenty-four mice were injected in total as summarized in the below table. The low dose was 1×10¹³ gc/kg (total 2×10¹¹ gc), and the high dose was 5×10¹³ gc/kg (total 1×10¹² gc). Additionally, a control mouse was injected with vehicle (1×PBS, 35 mM NaCl, 0.001% pluronic) alone. Thus, a total 25 mice comprised the study.

| | low dose (1 × | high dose (5 × |
|---|---|---|
| Vector | 10¹³ gc/kg) | 10¹³ gc/kg) |
| AAV9 CAG.GFP “AAV9” | 3 mice | 3 mice |
| AAVmut1 CAG.GFP “AAV^{mut1}” | 3 mice | 3 mice |
| AAV9deco1 CAG.GFP “AAV^{deco1}” | 3 mice | 3 mice |
| AAVmut1_deco1 CAG.GFP | 3 mice | 2 mice |
| “AAV^{mut1}^{_{—}}^{deco1}” | | |

| | |
|---|---|
| Control (vehicle) | 2 mice |

[0323] The mice were sacrificed 28 days after the injection. Individual tissues, notably the liver, major skeletal muscles of the bind limb, heart, and diaphragm, were collected at the time of necropsy. Tissue were immediately placed into the preservative RNAlater, after which the RNAlater was removed and the tissue flash frozen. The same tissues were fixed and embedded for sectioning and anti-GFP staining by immunohistochemistry (IHC).

[0324] GFP expression was assessed by anti-GFP IHC, and ddRT-PCR for the eGFP vector genome copies per DPG (DNA) and transcript (mRNA). The eGFR transcript level was compared against the transcript of a housekeeping standard RPP30. IHC was performed at Histoserv Inc. (Germantown, MD). ddRT-PCR was performed at Affinia Therapeutics (Waltham, MA).

[0325] Images of exemplary liver and skeletal muscle tissue cross-sections obtained from the anti-GFP IHC are provided in FIGS. 4A-4J. The tissue cross-sections were stained with an anti-GFP primary antibody followed by an HRP-linked secondary staining and substrate addition. Brown staining of cells above the counterstain for intact cells and nuclei indicates eGFP expression. The vehicle control tissues from liver or skeletal muscle show the structure and organization expected from healthy tissues. AAV9 at 5×10¹³ gc/kg robustly transduces the liver and muscle cells (brown individual cells). GFP expression within the liver is reduced in mice injected with AAV-mut1-deco1, such that isolated individual cells are stained. On the other hand, GFP expression within muscle tissue was significantly increased in the mice injected with AAV-mut1-deco1.

[0326] Transgene transfer and expression capabilities of administered vectors were also evaluated with ddPCR, by measuring amounts of DNA and mRNA of the transgene (eGFP) in the various tissue samples 28 days after injection. DNA genome copies and mRNA transcript copies of the transgene (eGFP) were quantified in comparison to the amounts of DNA genome copies or mRNA transcript copies of a house keeping gene (RPP30), respectively. Specifically, DNA genome copies are reported as vector genomes copies per diploid genome (VGC/DG). The formula for calculating the output is VGC/DG=(eGFP cp/μL÷RPP30 cp/μL)×2. RNA transcript copies are reported as % eGFP expression, which is calculated according to the formula, % eGFP expression=(eGFP cp/μL÷RPP30 cp/μL)×100.

[0327] Tissues were homogenized in a Qiagen Tissuelyser It (20 rps for 2 min) in lysis buffer from the Qiagen Dneasy Blood and Tissue Kit or the Qiagen RNeasy Lipid Tissue Mini Kit following the standard Qiagen protocol. Samples were eluted in 50 uL of buffer. Prior to analysis, DNA and RNA concentration and quality were determined using a NanoDrop One, using the nucleic acid (DNA or RNA) program. DNA samples were analyzed for biodistribution of vector genomes using a duplexed ddPCR method targeting the transgene (eGFP) and a reference gene (RPP30). RNA samples were analyzed for expression of the eGFP transgene using a duplexed, one-step RT-ddPCR method and a reference gene (RPP30).

[0328] mRNA was extracted from 30 mg sections of liver, and quadriceps. The results of the ddPCR assays are shown in FIG. 5A and FIG. 5B which show that AAV^{Mut1} reduces liver tropism but does not enhance muscle tropism, AAV^{Deco1} has high liver tropism and comparatively high muscle tropism, and that AAV^{Mut1_deco1} has decreased liver tropism and increased muscle tropism compared to AAV9 (WT). Other muscle tissues examined, discussed below, and showed a similar trend and the DNA and RNA results generally agree.

[0329] eGFP mRNA expression in various tissues was measured by RT-ddPCR and presented as the ratio of eGFP transcripts over RPP30 transcripts, a rough indicator of eGFP mRNA copies per cell. The results are provided in FIG. 6A (liver), FIG. 6B (heart), FIG. 6C (tricep surae), FIG. 6D (quadricep), and FIG. 6E (diaphragm). For each tissue, results from three biological replicates are provided for each AAV variant at each dose (high or low dose). Statistically significant differences were determined by an ANOVA 1-way test with P-values and indicated with asterisks. * P<0.1, * P<0.01, *** P<0.001, **** P<0.0001, ns=not significant.

[0330] FIG. 6A provides the ratio of eGFP to RPP30 transcripts in the liver. At 5×10¹³ gc/kg dose, both AAV^{mut1} and AAV^{mut1_deco1} had a greater than 3-log lower levels of eGFF expression in the liver compared to AAV9. AAV^{deco1} had almost 3-logs higher expression in the liver than AAV^{mut1_deco1}.

[0331] FIG. 6B shows the ratio of eGFP to RPP30 transcripts in the heart. Both AAV^{deco1} and AAV^{mut1_deco1} had higher expression in the heart, although the difference and significance are reduced by a single outlier within the AAV9 at 5×10³ gc/kg dose group, and possible signal saturation within the AAV^{deco} and AAV^{mut1_deco1} high dose group. The level of expression is significantly higher in AAV^{deco1} compared to AAVmut1 at 5×10¹³ gc/kg, and there was no significant difference between high dose AAV^{deco1} and AAV^{mut1_deco1}, notwithstanding the possible signal saturation.

[0332] FIG. 6C shows the ratio of eGFP to RPP30 transcripts in the triceps surae. Within the 5×10¹³ gc/kg groups, there was more than 1-log increase in the eGFP per RPP30 mRNA ratio in AAV9^{deco1} and AAV^{mut1_deco1} compared to AAV9 in the calf muscle tissue of the study subjects. Importantly, there was no significant difference between the high dose AAV9 group and the 1×10¹³ gc/kg low dose groups of AAV^{deco1} and AAV^{mut1_deco1}.

[0333] FIG. 6D shows the ratio of eGFP to RPP30 transcripts in the quadricep. Results were similar to the triceps surae, the other skeletal muscle tested in this study. Within the 5×10¹³ gc/kg groups, there is more than 1 log increase in eGFP per RPP30 mRNA ratio in AAV^{deco1} and AAV^{mut1_deco1} compared to AAV9 in quadricep tissue of the study subjects. Importantly, there is no significant difference between the high dose AAV9 group and the 1×10¹³ gc/kg low dose groups of AAV^{deco1} and AAV^{mut1_deco1}.

[0334] FIG. 6E shows the ratio of eGFP to RPP30 transcripts in the diaphragm. Increase of gene delivery efficacy in deco-containing vectors was also observed in the diaphragm, but in this study all but one comparison exceeded the threshold of significance: high dose AAV9 versus high dose AAV^{deco1}.

### 7.3. Example 3: Enhanced Muscle Tropism with Limited Liver Tropism for AAV^{mut1-deco1} Confirmed at the Earlier d14 Time Point in C57BL/6 Mice

[0335] Gene transfer efficacy of AAV9 vector and AAV^{mut1_deco1} vector was tested with groups of three C57BL/6 mice, injected with one of the vectors by intravenous tail vein injection. Total thirteen mice were injected in total as summarized in the below table. The dose was 1×10¹³ gc/kg (total 2×10¹¹ gc). Additionally, a control mouse was injected with vehicle (1×PBS, 35 mM NaCl, 0.001% pluronic) alone.

| | | Dose | No. of | Study | |
|---|---|---|---|---|---|
| Treatment | Route | (vgs) | Animal | Duration | Necroscopy |
| Vehicle/control | IV | 0 | 1 | 14 days | Organ |
| AAV^{mut1} | IV | 1.00E+13 | 3 | | collection |
| AAV^{mut1}^{_{—}}^{deco1} | IV | 1.00E+13 | 3 | | |
| AAV^{mut1} | IV | 1.00E+13 | 3 | 28 days | |
| AAV^{mut1}^{_{—}}^{deco1} | IV | 1.00E+13 | 3 | | |

[0336] The mice were sacrificed 14 or 28 days after the injection. Individual tissues, notably the liver and major skeletal muscles of the hind limb (quad), were collected at the time of necropsy. Tissues were immediately placed into the preservative RNAlater, after which the RNAlater was removed and the tissue flash frozen. The same tissues were fixed and embedded for sectioning and anti-GFP staining by immunohistochemistry (IHC).

[0337] eGFP expression was assessed by anti-GFP IHC. IHC was performed at Histoserv Inc. (Germantown, MD). ddRT-PCR was performed at Affinia Therapeutics (Waltham, MA) as described above.

[0338] DNA and RNA were extracted from 30 mg sections. DNA and RNA samples were assayed for eGFP vector genome or mRNA transcript by ddRT-PCR and normalized to murine RPP30 genomic copies or RPP30 mRNA copies, respectively. Triplicate technical replicates were performed. The results are shown in FIGS. 7A-7D.

[0339] FIGS. 7A-7B show eGFP vector genome (DNA) in liver and quad tissues of C57BL/6 mice 14 days (FIG. 7A) or 28 days (FIG. 7B) after treatment with vehicle, AAVMut1 and AAVMut1-deco1 AAV vectors. FIGS. 7C-7D show eGFP mRNA expression in liver and quad tissues of C57BL/6 mice 14 days (FIG. 7C) or 28 days (FIG. 7D) after treatment with vehicle, AAV^{Mut1} and AAV^{Mut1_deco1} AAV vectors.

[0340] As can be seen from these data, AAV^{Mut1_deco1} enhancement of muscle tropism is observable at d14; AAV^{Mut1} and AAV^{Mut1_deco1} vector genome copies (VGs) are stable from d14 to d28; AAV^{Mut1_deco1} enhancement leads to greater accumulation of eGFP signal; and liver tropism is consistently low through all samples.

### 7.4. Example 4: Confirmed Enhanced Muscle Tropism with Limited Tropism to Liver and Other Organs for AAV^{-mut1_deco1} in BALB/c Mice

[0341] Gene transfer efficacy of AAV^{mut1} and AAV^{mut1_deco1} were tested with three or six BALB/c mice, injected with one of the vectors at 5×10¹³ gc/kg (total 1×10¹² gc) by intravenous tail vein injection. Additionally, control mice were injected with vehicle (1×PBS, 35 mM NaCl, 0.001% pluronic) alone. Total twelve mice were injected in total as summarized in the below table.

| Vector | 5 × 10¹³ gc/kg (total 1 × 10¹² gc) |
|---|---|
| Control (vehicle) | 3 mice |
| AAVmut1 CAG.GFP | 6 mice |
| AAVmut1_deco1 CAG.GFP | 3 mice |

[0342] The mice were sacrificed 28 days after the injection. Individual tissues, notably the liver, major skeletal muscles of the hind limb, heart, diaphragm, brain, spinal cord, and spleen were collected at the time of necropsy.

[0343] DNA and RNA were extracted from 30 mg sections of liver and quadricep. DNA and RNA samples were assayed for eGFP vector genome or mRNA by ddRT-PCR and normalized to murine RPP30 genomic copies or RPP30 mRNA copies. Triplicate technical replicates were performed. The results are provided in FIG. 8.

[0344] The results show no increase in liver tropism with AAV^{mut1 deco1} but increase of tropism in the quadriceps compared to AAV^{mut1}. Further the data showed a similar AAV^{mut1 deco1} enhancement in the heart, triceps surae, and diaphragm compared to AAV^{mut1}. There was no significant difference found in the spleen, spinal cord, or liver.

### 7.5. Example 5: Summary of Mouse Data

[0345] The below Table exemplifies the Muscle:Liver infection ratios calculated for the DNA biodistribution data, the RNA expression data and the IHC expression data obtained for administration of AAV^{mut1_deco1} vector compared to AAV9 vector in Mice.

| | | | DNA | | RNA | | IHC |
|---|---|---|---|---|---|---|---|
| | | | Muscle:Liver | | Muscle:Liver | | Muscle:Liver |
| | | DNA | infection | RNA | infection | IHC | infection |
| Tissue | Treatment | Biodistribution† | ratio | % Expression† | ratio | Expression† | ratio |
| Liver | AAV9 | 151.4 | | 418083 | | 99 | |
| Liver | AAV^{mut1}^{_{—}}^{deco1} | 0* | | 373.9 | | 4.3 | |
| Quadriceps | AAV9 | 0.9 | 0.01 | 184.0 | 0.00 | 0.7 | 0.01 |
| Quadriceps | AAV^{mut1}^{_{—}}^{deco1} | 0.3 | >10,000* | 7277.0 | 19.46 | 8.7 | 2.02 |
| Triceps | AAV9 | 0.3 | 0.00 | 322.2 | 0.00 | 0.0 | 0.00 |
| Surae | | | | | | | |
| Triceps | AAV^{mut1}^{_{—}}^{deco1} | 0.5 | >10,000* | 7092.3 | 18.97 | 15.0 | 3.49 |
| Surae | | | | | | | |
| Heart | AAV9 | 0.5 | 0.00 | 4975.2 | 0.01 | 10.7 | 0.11 |
| Heart | AAV^{mut1}^{_{—}}^{deco1} | 3.8 | >10,000* | 322.2 | 0.86 | 68.3 | 15.88 |

*when liver value is zero, then the ratio is >10,000 by convention.

### 7.6. Example 6: Confirmed Enhanced AAV^{-mut1-deco1} Muscle Tropism with Limited Liver Tropism Confirmed in NHP

[0346] The objective of this study is to confirm liver retargeting and muscle transduction superiority of AAV^{mut1_deco1} vector compared to AAV9 vector in non-human primates (NHP) as was observed in mice. The results confirm enhanced muscle transduction superiority and liver de-targeting of AAV^{Mut1_Deco1} vector compared to AAV9.

[0347] Two AAV constructs were used in the experiment: (i) AAV^{-mut1.deco1}-CAG-GFP, and (ii) AAV9-CAG-GFP, each including an AAV genome construct containing a coding sequence of GFP. GFP was used to detect distribution of AAVs and expression of the transgene. Marmoset monkeys were used as the subject animals.

[0348] Total of 7 animals were divided into 3 groups as summarized in the below TABLE #. Immunosuppression of the animals began 7 days prior to vector administration. Group 1 is a control animal administered with vehicle. Animals in Group 2 and 3 were administered with 1×10¹⁴ vg (viral genome or GC) of AAV9 vector or AAV^{mut1_deco1} vector by IV to the right saphenous vein. Animals were sacrificed on day 28 after the vehicle or AAV vector administration and their organ samples were collected for analysis.

| | Route of | Dose | No. of | Volume | Study |
|---|---|---|---|---|---|
| Treatment | Administration | (vgs) | Animal | (ml) | Duration |
| Vehicle/control | IV | 0 | 1 | 0.625 | 28 days |
| AAV9 (WT) vector | IV | 1.00E+14 | 3 | 0.625 | |
| AAV^{mut1}^{_{—}}^{deco1}vector | IV | 1.00E+14 | 3 | 0.625 | |

[0349] IHC for GFP expression were scored (blinded) by a pathologist. A second pathologist peer reviewed the data. Initial assessment for GFP expression by IHC was conducted on one section per tissue-referred to as Run 1 tissues and included liver, heart and skeletal muscle (right and left sides-tibialis, biceps, quadriceps, gastrocnemius. Two additional sections per muscle group were run to assess consistency of expression within each muscle group-referred to as Run 2.

[0350] Analysis of Run 1 tissue samples is shown in FIGS. 9A and 9B. Exemplary IHC liver tissue is shown in FIG. 9A, obtained from AAV9 treated animal on the left, and AAV^{mut1_deco1} treated animal illustrated on the right side of the chart. Exemplary IHC quadriceps tissue is shown in FIG. 9B, obtained from AAV9 treated animal on the left, and AAV^{mut1_deco1} treated animal on the right.

[0351] FIG. 10 shows the % GFP positive cells in the liver tissue (right and left side of the organ) and quadriceps tissue (right and left leg) in slides obtained from Run 1 for each animal administered vehicle or vector (AAV9 or AAV^{mut1deco1}).

[0352] FIG. 11 shows the % GFP positive cells in various skeletal muscle and liver tissue (average from Runs 1 and 2) for each animal administered vehicle and vector (AAV9 or AAV^{mut1deco1}). FIG. 12 shows the % GFP positive cells per animal in various skeletal muscle and liver tissue (average from Runs 1 and 2) for each animal administered vehicle and vector (AAV9 or AAV^{mut1deco1}). FIG. 13 shows the average combined quantification of % GFP positive cells per animal in various skeletal muscle and liver tissue (average from Runs 1 and 2) for each animal administered vehicle and vector (AAV9 or AAV^{mut1deco1}).

[0353] FIG. 14 shows the % GFP positive cells in various cardiac tissue (average from Runs 1 and 2) for each animal administered vehicle and vector (AAV9 or AAV^{mut1deco1}) FIG. 15 shows the % GFP positive cells per animal in various cardiac muscle (average from Runs 1 and 2) for each animal administered vehicle and vector (AAV9 or AAV^{mut1deco1}). FIG. 16 shows the average % GFP positive cells per animal in various cardiac muscle (average from Runs 1 and 2) for each animal administered vehicle and vector (AAV9 or AAV^{mut1deco1}).

[0354] FIGS. 17A-17C show the average % GFP positive cells per animal in various tissues (average from Runs 1 and 2) for vehicle, AAV9 and AAV^{mut1_deco1} vectors. FIG. 17A shows average % GFP positive cells per animal in liver tissue. FIG. 17B shows average % GFP positive cells per animal in various skeletal muscle tissue. FIG. 17C shows average % GFP positive cells per animal in various cardiac tissue.

[0355] DNA samples were analyzed for biodistribution of vector genomes in the liver and quadriceps tissue using a duplexed ddPCR method targeting the transgene (eGFP) and a reference gene (RPP30). The results are shown in FIGS. 18A (liver), 18B (quadriceps), 18C (biceps), 18D (heart) where the x-axis represents AAV vectors (wild type AAV9 on the left and AAV^{mut1deco1} on the right) and whether the sample was taken from the left or right side of the organ/animal.

[0356] mRNA transcript amounts measured by eGFP copies of eGFP over RPP30 mRNA are shown in FIGS. 19A (liver), 19B (quadriceps), 19C (biceps), 19D (heart). The x-axis represents AAV vectors (wild type AAV9 on the left and AAV^{mut1deco1} on the right) and whether the sample was taken from the left or right side of the organ/animal.

[0357] The DNA, RNA and IHC expression data obtained from NHP experiments are quantified and summarized in the below Table where each IHC stain is a technical replicate, data from all tissues combined including left and right sides; averages of the data obtained for all three animals is shown. Notably, heart data includes data from ventricles and atria but does not include septum.

| | | DNA | | | | IHC | |
|---|---|---|---|---|---|---|---|
| | | Biodistribution^{†} | | RNA | | Expression^{†} | |
| Tissue | Treatment | VGC/DG | | % Expression^{†} | | % GFP | |
| Liver | AAV9 | 73.7 | (32.7) | 104.1 | (107.6) | 17.5 | (4.9) |
| Liver | AAV^{mut1}^{_{—}}^{deco1} | 0.7 | (0.6) | 51.1 | (68.3) | 1.9 | (1.4) |
| Quadriceps | AAV9 | 2.2 | (1.3) | 589.5 | (693.1) | 35.8 | (17.7) |
| Quadriceps | AAV^{mut1}^{_{—}}^{deco1} | 3.8 | (3.6) | 3814.4 | (5954.5) | 46.4 | (21.0) |
| Biceps | AAV9 | 2.5 | (1.0) | 1327.3 | (3005.6) | 22.6 | (11.6) |
| Biceps | AAV^{mut1}^{_{—}}^{deco1} | 4.4 | (6.0) | 3677.6 | (3962.5) | 47.2 | (14.9) |
| Heart | AAV9 | 3.6 | (2.2) | 2303.6 | (1503.9) | 44.6 | (10.1) |
| Heart | AAV^{mut1}^{_{—}}^{deco1} | 0.5 | (1.5) | 134.3 | (52.1) | 20.44 | (15.8) |

^{†}Mean (St. Dev.)

[0358] The below Table exemplifies the Muscle:Liver infection ratios calculated for the DNA biodistribution data, the RNA expression data and the IHC expression data obtained for administration of AAV^{mut1_deco1} vector compared to AAV9 vector in non-human primates (NHP) as shown in the table above.

| | | | DNA | | RNA | | IHC |
|---|---|---|---|---|---|---|---|
| | | | Muscle:Liver | | Muscle:Liver | | Muscle:Liver |
| | | DNA | infection | RNA | infection | IHC | infection |
| Tissue | Treatment | Biodistribution† | ratio | % Expression† | ratio | Expression† | ratio |
| Liver | AAV9 | 73.7 | | 104.1 | | 17.5 | |
| Liver | AAV^{mut1}^{_{—}}^{deco1} | 0.7 | | 51.1 | | 1.9 | |
| Quadriceps | AAV9 | 2.2 | 0.03 | 589.5 | 5.66 | 35.8 | 2.05 |
| Quadriceps | AAV^{mut1}^{_{—}}^{deco1} | 3.8 | 5.43 | 3814.4 | 74.65 | 46.4 | 24.42 |
| Biceps | AAV9 | 2.5 | 0.03 | 1327.3 | 12.75 | 22.6 | 1.29 |
| Biceps | AAV^{mut1}^{_{—}}^{deco1} | 4.4 | 6.29 | 3677.6 | 71.97 | 47.2 | 24.84 |
| Heart | AAV9 | 3.6 | 0.05 | 2303.6 | 22.13 | 44.6 | 2.55 |
| Heart | AAV^{mut1}^{_{—}}^{deco1} | 0.5 | 0.71 | 134.3 | 2.63 | 20.44 | 10.76 |

### 7.7. Example 7: Development of rAAV Constructs with High MTM1 Expression

[0359] Myotubular myopathy (XLMTM, OMIM 310400) is a severe congenital muscular disease due to mutations in the myotubularin gene (MTM1) and characterized by the presence of small myofibers with frequent occurrence of central nuclei. Myotubularin is a ubiquitously expressed phosphoinositide phosphatase with a muscle-specific role in man and mouse that is poorly understood.

[0360] The objective of the current study was to identify a promoter that provides a broad biodistribution of expression within skeletal muscle. We have constructed nine human MTM1 expressing AAV gene expression constructs with various promoters and transgenes to transduce skeletal muscle and express adequate amounts of MTM1 protein for the treatment of XLMTM.

[0361] 7.7.1. Materials & Methods

[0362] 7.7.1.1 Cloning of MTM1 Expression Constructs

[0363] A nucleotide sequence was synthesized to include the untranslated first exon and a portion of the intron from the human Cytomegalovirus (hCMV) IE gene, a portion of the intron of the second intron of the human beta globin gene, a portion of the 3^{rd} exon of the human beta globin gene, a NotI restriction site, a predicted optimal Kozak sequence, a codon optimized human MTM1 CDS with a modified stop codon using a sequence provided by Genscript, a Pac restriction site which overlaps with the modified stop codon, the Rabbit beta-globin PolyA signal sequence, an AvrII site, and the first 10 bp of the AAV2 ITR. This fragment and SA024, an AAV2 ITR plasmid containing a Desmin promoter, a chimeric intron and exon of the CMV IE gene and human beta globin, a gene of interest, and a Rabbit beta-globin PolyA signal, were digested with BstBI, which has a site in CMV IE exon 1, and XhoI, which has a site in the Rabbit beta-globin PolyA signal. Portions of SA024 containing the first ITR and expression regulatory sequences 5′ to the gene of interest are provided as SEQ ID NO:204 and the portions of SA024 from the 3′ of the open reading frame of the gene of interest through the second ITR are provided as SEQ ID NO:205. The 2443 bp long fragment containing MTM1 and the 6693 bp long fragment containing the plasmid elements were isolated by agarose gel electrophoresis and eluted from the agarose using NEB Monarch DNA Gel isolation kit. Ligations of the sticky end fragments were performed with T4 DNA ligase. Successful ligation products were isolated from E. coli transformants and confirmed by restriction digest and Sanger sequencing to confirm the insertion of the codon optimized MTM1 sequence and the additional features. The portions of the vector within the ITRs (and including the ITRs) are provided as SEQ ID NO:181.

[0364] Two additional codon optimizations for the MTM1 CDS using sequences derived from algorithms provided by GeneArt and Eurofins as well as the native MTMT CDS (SEQ ID NO:202) were synthesized (used in SEQ ID NOS:182, 183 and 184 described below, respectively). These three sequences with the addition of a NotI site and a Kozak site at the 5′ end and a modified stop codon and PacI site at the 3′ end of the sequence were synthesized at GeneArt, Eurofins, and Genscript, respectively, An additional sequence was synthesized by Genscript using an algorithm to both optimize the codons for expression and reduce the number of CpG sequences within the synthetic product (used in SEQ ID NO:185). These fragments or plasmids containing these fragments were digested with NotI and PacI along with the vector containing SEQ ID NO:181. The 1823 bp fragment containing the MTM1 CDSs and the 7350 bp fragment containing the plasmid and ITR sequence and other SEQ ID NO:181 features were isolated by agarose gel electrophoresis and eluted from the agarose using NEB Monarch DNA Gel isolation kit. Ligations of the sticky end fragments were performed with T4 DNA ligase. Successful ligation products were isolated from E. coli transformants and confirmed by restriction digest and Sanger sequencing to confirm the insertion of the codon optimized or native MTM1 sequence and the additional features (the portions of these vectors within (and including) the ITRs are provided as SEQ ID NOS:182-185).

[0365] Constructs containing a promoter which is a hybrid of the CMV immediate early enhancer, and the chicken beta-actin promoter were also made. The hybrid is referred to as the CAG promoter. The CAG promoter was amplified from construct 7701591057 (the portion of which within (and including) the ITRs is provided as SEQ ID NO:201), which had been synthesized previously, using a 5′ primer with the sequence SEQ ID NO: 209 (ttttGGTACCgacattgattattgactagttatt) which contains a KpnI restriction site and a Poly T tag to aid in restriction digestion and a region matching the start of the CMV immediate early promoter in a linear amplification reaction. The amplification product was isolated from the amplification mixture with NEB Monarch DNA Gel isolation kit. A second amplification step was performed with a primer with the sequence SEQ ID NO: 210 (aaaaaa gatatc cgcccgccgcgc) which contains a region matching the reverse complement of the Chicken beta actin promoter, an EcoRV restriction site, and a poly A sequence to aid in fragment digestion. The 675 base pair fragment (SEQ ID NO:200) was isolated by agarose gel electrophoresis and eluted from the agarose using NEB Monarch DNA Gel isolation kit. The 675 bp fragment and SEQ ID NO:181 vector were digested with KpnI and EcoRV. The 663 bp digested fragment of the amplification and the 8581 bp fragment of the SEQ ID NO:181 vector were isolated by agarose gel electrophoresis and eluted from the agarose using NEB Monarch DNA Gel isolation kit. Ligations of the sticky end fragments were performed with T4 DNA ligase. Successful ligation products were isolated from E. coli transformants and confirmed by restriction digest and Sanger sequencing to confirm the insertion of the CAG promoter sequence into the vector containing SEQ ID NO:181 resulting in a vector containing SEQ ID NO:186, which includes an MTM1 CDS with codon optimizations provided by Genscript.

[0366] To insert the GeneArt codon optimized MTM1 sequence and the Eurofins codon optimized MTM1 sequence into the SEQ ID NO:186 containing vector, vectors with SEQ ID NO:182, SEQ ID NO:183, and SEQ ID NO: 186 were digested with KpnI and EcoRV. The 663 base pair fragment from the SEQ ID NO: 186 containing vector and the 8581 bp fragment from the digests of the vector with SEQ ID NO:182 and SEQ ID NO:183 were isolated by agarose gel electrophoresis and eluted from the agarose using NEB Monarch DNA Gel isolation kit. Ligations of the sticky end fragments were performed with T4 DNA ligase. Successful ligation products were isolated from E. coli transformants and confirmed by restriction digest and Sanger sequencing to confirm the insertion of the CAG promoter sequence into the SEQ ID NO:182 and SEQ ID NO:183 vectors, resulting in vectors containing SEQ ID NO:187 (GeneArt) and SEQ HD NO:188 (Eurofins).

[0367] To insert the native MTI sequence into the vector containing SEQ ID NO: 186, the native MTM1 sequence was amplified from the vector containing SEQ ID NO:184 using a 5′ primer with the sequence TTTGAGCGGCCGCCA which corresponds to the Kozak and start sequence of MTM1 and contains a NotI restriction site and a 3′ primer with the sequence GATCTTAATTAAAAGTGAGTTTGCACATGGG which contains the reverse complement to the 3′ end of MTM1, an altered stop codon, and a Pac restriction site. The 1837 base pair PCR product (SEQ ID NO:19) was isolated by agarose gel electrophoresis and eluted from the agarose using NEB Monarch DNA Gel isolation kit. The purified amplicon and the vector containing SEQ ID NO: 186 were digested with NotI and PacI. The 1823 bp fragment containing the MTM1 CDS and the 7350 bp fragment containing the plasmid and ITR sequence and other SEQ ID NO:186 features were isolated by agarose gel electrophoresis and eluted from the agarose using NEB Monarch DNA Gel isolation kit. Ligations of the sticky end fragments were performed with T4 DNA ligase. Successful ligation products were isolated from E. coli transformants and confirmed by restriction digest and Sanger sequencing to confirm the insertion of the native MTM1 sequence and the additional features SEQ ID NO:186 resulting in a vector with SEQ ID NO: 189.

[0368] 7.7.1.2 Cloning of self-complementary MTM1 Expression Constructs

[0369] The vectors described above are single stranded vectors. To overcome potential limitations on expression from these vectors, self-complementary vectors were constructed. Genscript synthesized a vector which contained the sequence of the miniTK promoter, an alternate gene of interest, the Rabbit beta-globin PolyA signal, and an AAV2 ITR which contains a deletion in the D region of the ITR. A miniTK portion of the vector is provided as SEQ ID NO:190 and the portion of the vector containing the rabbit globin poly A and ITR is provided as SEQ ID NO: 191. This synthetic sequence was flanked by SalI site at the 5′ end and AscI at the 3′ end. This fragment was introduced into the vector comprising SEQ ID NO:201 via restriction enzyme digestion, agarose gel fragment isolation, and T4 DNA ligase ligation. Successful ligation products were isolated from E. coli transformants and confirmed by restriction digest and Sanger sequencing to confirm the insertion of self-complementary vector sequence into the vector comprising SEQ ID NO:201 resulting in a vector containing SEQ ID NOS:190 and 191. The first ITR and miniTK portions of the vector are provided as SEQ ID NO:206 and the rabbit poly and second ITR portions of the vector are provided as SEQ ID NO:207.

[0370] To create self-complementary vectors of the appropriate size for successful packaging into AAV capsids, the miniTK promoter was synthesized with KpnI restriction site at the 5′ end and a NotI site at the 3′ end. Additionally, bases were added to the synthesize product to enhance the efficiency of restriction digestion SEQ ID NO: 192. The fragment containing SEQ ID NO:192 was digested with KpnI and NotI and inserted into a vector containing SEQ ID NO:184 via the same restriction sites following agarose gel electrophoresis, gel extraction, T4 ligation. This vector (the portion of which within (and including) the ITRs is provided as SEQ ID NO:11B) after sequencing, was determined to have an undesired deletion in the 5′ ITR. However, the insert of SEQ ID NO:193 was identical to the desired sequence. The miniTK-native MTM1 sequence was PCR amplified using the 5′ primer SEQ ID NO: 211 (tttttGtcGACTTCGCATATTAAGGTGACGCGT) which contains a polyT sequence to aid in restriction digestion, the KpnI site, and the 5′ end of the miniTK promoter and the 3′ primer SEQ ID NO: 212 (tttttt cctagg gagTGAGAGACACAAAAAATTCCAACACAC), which contains a polyT sequence to aid in restriction digestion, an AvrII site, and the reverse complement of the 3′ end of the Rabbit beta-globin PolyA signal creating SEQ ID NO: 194. SEQ ID NO:194 and the vector containing SEQ ID NOS:190 and 191 were digested with KpnI and SalI. The 2024 bp fragment with SEQ ID NO: 194 and the 6603 bp fragment comprising SEQ ID NO:190 and SEQ ID NO:191 were isolated by agarose gel electrophoresis and eluted from the agarose using NEB Monarch DNA Gel isolation kit. Ligations of the sticky end fragments were performed with T4 DNA ligase. Successful ligation products were isolated from E. coli transformants and confirmed by restriction digest and Sanger sequencing to confirm the insertion of the promoter and native MTM1 CDS into the vector with appropriate ITRs for creating a self-complementary AAV vector. The vector created this way contains a full ITR, the miniTK promoter, the native MTM1 CDS, the Rabbit beta-globin Poly A signal and an ITR with an appropriate deletion to create a self-complementary AAV vector. The portion of this vector within (and including) the ITRs is provided as SEQ ID NO:208.

[0371] To create a similar vector with a miniaturized version of the Desmin promoter, the mini Desmin promoter was synthesized with KpnI site at the 5′ end and NotI site at the 3′ end (SEQ ID NO: 195). Additional bases were added to the synthesized product to enhance the efficiency of restriction digestion (SEQ ID NO:196). The fragment containing SEQ ID NO:196 was digested with KpnI and NotI and inserted into a vector containing SEQ ID NO:184 via the same restriction sites following agarose gel electrophoresis, gel extraction, T4 ligation. This vector (the portion of which within (and including) the ITRs is provided as SEQ ID NO:197), after sequencing, was determined to have a undesired deletion in the 5′ ITR. However, the insert of SEQ ID NO:197 was identical to the desired sequence. The miniDes-native MTM1 sequence was PCR amplified using the 5′ primer SEQ ID NO: 213 (tttttGtcGACCCTCTATAAATACCCGCTCTGG) which contains a polyT sequence to aid in restriction digestion, the KpnI site, and the 5′ end of the miniDesmin promoter and the 3′ primer SEQ ID NO: 214 (tttttt cctagg gagTGAGAGACACAAAAAATTCCAACACAC) which contains a polyT sequence to aid in restriction digestion, an AvrII site, and the reverse complement of the 3′ end of the Rabbit beta-globin PolyA signal creating SEQ ID NO:198. SEQ ID NO:198 and the vector comprising SEQ ID NO:190 and SEQ ID NO:191 were digested with KpnI and SalI. The 2185 bp fragment containing SEQ ID NO:198 and the 6603 bp fragment containing comprising SEQ ID NO:190 and SEQ ID NO:191 were isolated by agarose gel electrophoresis and eluted from the agarose using NEB Monarch DNA Gel isolation kit. Ligations of the sticky end fragments were performed with T4 DNA ligase. Successful ligation products were isolated from E. coli transformants and confirmed by restriction digest and Sanger sequencing to confirm the insertion of the promoter and native MTM1 CDS into the vector with appropriate ITRs for creating a self-complementary AAV vector. The vector created this way contains a full ITR, the miniDesmin promoter, the native MTM1 CDS, the Rabbit beta-globin Poly A signal and an ITR with an appropriate deletion to create a self-complementary AAV vector. The portion of this vector within (and including) the ITRs is provided as SEQ ID NO:199.

[0372] 7.7.1.3 Expression Studies by Cell Transfection

[0373] The RD cell line (ATCC CCL-136) was used for our in vitro expression studies. RD cells are derived from patients with Rhabdomyosarcoma, a rare form of pediatric cancer that develops from skeletal muscles. RD cells were maintained in 10% FBS DMEM inside a humidified 37 degrees C. incubator with 5% CO₂ air with serial passage every three to four days following TrypLE non-enzymatic lifting and replating at ¼th density.

[0374] 24 h prior to transfection, RD cells were lifted with TrypLE, pelleted (7′, room temperature, 1400×g), and resuspended in media. Viability was determined by Trypan Blue exclusion using two chambers of a Countess automated cell counter (Thermo Fisher). Average cell density was adjusted to 3.2E5 live cells per mL and 1.6E5 viable cells were plated in 500 uL media. In a 24 well plate.

[0375] On the day of transfection, all reagents were warmed to room temperature before use. Plasmid DNA was diluted to 250 ng/uL in TE buffer. Enough reagent was used to transfect 4 wells per plasmid. 100 uL OptiMEM (gibco) plus 6 uL Lipofectamine 3000 (Thermofisher, lot 2170726) was prepared per plasmid. Separately, 100 uL of OptiMEM plus 6 ug of DNA (24 uL of 250 ng/uL diluted plasmid) plus 12 uL 3000 Reagent (Thermo Fisher) were combined. The diluted DNA was then mixed with the diluted Lipofectamine 3000, spun down briefly, and incubated at room temperature for 16 minutes. 57 uL of the mixture was added to each of 4 wells per plasmid. Some wells of cells were left untransfected to serve as a negative control.

[0376] 24 hours post-transfection, RD cells were imaged on a BioTek Lionheart for eGFP expression to confirm successful transfection and to estimate % transfection efficiency. A 1 second exposure using the LED intensity setting of 10 was used. After imaging, the cells were washed with 500 uL DPBS. The DPBS was removed and 125 uL TrypLE was added and incubated for 5 minutes at 37 degrees C. in a humidified incubator with 5% CO2. The cells were triturated to resuspend and pelleted at 140×g at 4 degrees C. for 7 minutes. 5 mL of 2× lysis was buffer was prepared in sterile filtered dH2O with 10×RIPA buffer (Cell Signaling) with 1 tablet of Roche EDTA-free Mini Complete Protease Inhibitor. 12 uL of the 2× lysis buffer was added to the cell pellet. The lysate was vortexed briefly and spun down. Samples, lysed or unlysed, were stored at minus 80 degrees C.

[0377] Plasmids used: In addition to the MTM1 expression constructs, certain reference plasmids were used. Plasmid 7701591057, a fully-synthesized plasmid vector, which contains AAV2 ITRs and eGFP under the control of the CAG promoter and the Rabbit beta-globin PolyA signal was used as a transfection control for fluorescently visualizing eGFP and percent of cells successfully transfected as well as a negative control for antibody-mediated MTM1 detection. pCDNA3.1+C/(K)DYK with human native MTM1 under the control of the CMV promoter, an in-frame DYK epitope tag, and a bovine Growth Hormone PolyA signal. This was obtained from Genscript.

[0378] 7.7.1.4 Automated Western Analysis

[0379] In vitro expression of MTM1 was analyzed using the ProteinSimple Jess automated western blot. Jess was utilized to fully automate capillary loading, protein separation, incubation, and detection. Protein lysates from transfected and untransfected RD cells were diluted 1:4 in 0.1× Sample Buffer+1× Fluorescent Master Mix (ProteinSimple, PS-STOIEZ-8) and 3 uL was loaded onto a separation module (ProteinSimple, SM-W004). Capillaries were incubated with an MTM1 polyclonal antibody at a 1:15 dilution (Proteintech, 13924-1-AP) and a Secondary Mouse Antibody conjugated with HRP (ProteinSimple, DM-001). In addition to an immunoassay, the Total Protein Detection module (ProteinSimple, DM-TPO1-1) was included to allow for normalization of MTM1 expression by total protein load. Total protein and MTM1 were detected by the chemiluminescence channel.

[0380] 7.7.2. Results

[0381] Results are shown in FIG. 20. Total human myotubularin protein levels were quantified in RD muscle cells following transfection with 9 different MTM1 containing expression plasmids. All Mtm1 expression plasmids expressed levels of MTM protein significantly greater than controls (untransfected and GFP transfected controls). The CAG promoter expressed higher MTM1 protein levels in RD cells compared to Desmin promoter containing plasmids. Codon optimization of the MTM1 transgene using GeneArt, Genscript, and Eurofins algorithms had minimal impact on expression of MTM1 protein in RD cells. These findings indicate that the CAG promoter drove higher levels of MTM1 protein expression in human RD muscle cells in vitro compared to plasmids containing the Desmin promoter.

### 8. EQUIVALENTS AND INCORPORATION BY REFERENCE

[0382] While the invention has been particularly shown and described with reference to a preferred embodiment and various alternate embodiments, it will be understood by persons skilled in the relevant art that various changes in form and details can be made therein without departing from the spirit and scope of the invention.

[0383] All references, issued patents and patent applications cited within the body of the instant specification are hereby incorporated by reference in their entirety, for all purposes.

### 9. SEQUENCES

[0384] Many of the nucleotide sequences provided below are obtained from double stranded vectors. Thus, one of skill in the art would appreciate that, unless the references throughout the specification and claims to nucleotide sequences provided herein also include references to the complementary sequences unless the context dictates otherwise

| | SEQUENCE (X or X″ can be any of the standard amino acids; |
|---|---|
| | for Anc library sequences (Anc80; Anc81; Anc82; Anc83; Anc84; Anc94; Anc110; Anc113; |
| SEQ ID | Anc126; and Anc127), X can be any one of the amino acids listed below for each toggle |
| NO | site) |
| SEQ ID | RGDLLLS |
| NO: 1 | |
| SEQ ID | AQTLAWPFKAQ |
| NO: 2 | |
| SEQ ID | AQSWSKPFLAQ |
| NO: 3 | |
| SEQ ID | DGTLAVPFKAO |
| NO: 4 | |
| SEQ ID | ESTLAVPFKAO |
| NO: 5 | |
| SEQ ID | ESTLAVPFKAO |
| NO: 6 | |
| SEQ ID | GGTLAVPFKAQ |
| NO: 7 | |
| SEQ ID | AQTLATPFKAQ |
| NO: 8 | |
| SEQ ID | ATTLATPFKAO |
| NO: 9 | |
| SEQ ID | DGTLATPFKAO |
| NO: 10 | |
| SEQ ID | GGTLATPFKAQ |
| NO: 11 | |
| SEQ ID | SGSLAWPFKAQ |
| NO: 12 | |
| SEQ ID | AQTLAQPFKAQ |
| NO: 13 | |
| SEQ ID | AQTLQQPFKAQ |
| NO: 14 | |
| SEQ ID | AQTLSNPFKAQ |
| NO: 15 | |
| SEQ ID | AOTLAVPFSNP |
| NO: 16 | |
| SEQ ID | QGTLAVPFKAQ |
| NO: 17 | |
| SEQ ID | NQTLAVPFKAQ |
| NO: 18 | |
| SEQ ID | EGSLAVPFKAQ |
| NO: 19 | |
| SEQ ID | SGNLAVPFKAQ |
| NO: 20 | |
| SEQ ID | EGTLAVPFKAQ |
| NO: 21 | |
| SEQ ID | DSTLAVPFKAQ |
| NO: 22 | |
| SEQ ID | AVTLAVPFKAQ |
| NO: 23 | |
| SEQ ID | AQTLSTPFKAQ |
| NO: 24 | |
| SEQ ID | AQTLPQPFKAQ |
| NO: 25 | |
| SEQ ID | AQTLSQPFKAQ |
| NO: 26 | |
| SEQ ID | AQTLQLPFKAQ |
| NO: 27 | |
| SEQ ID | AQTLTMPFKAQ |
| NO: 28 | |
| SEQ ID | AQTLTTPFKAQ |
| NO: 29 | |
| SEQ ID | AQYTLSQGWAQ |
| NO: 30 | |
| SEQ ID | AQMNATKNVAQ |
| NO: 31 | |
| SEQ ID | AQVSGGHHSAQ |
| NO: 32 | |
| SEQ ID | AQTLPQPFKAQ |
| NO: 33 | |
| SEQ ID | AQTLATPFKAQ |
| NO: 34 | |
| SEQ ID | AQTLTMPFKAQ |
| NO: 35 | |
| SEQ ID | AQTLTAPFKAQ |
| NO: 36 | |
| SEQ ID | AQTLSKPFKAQ |
| NO: 37 | |
| SEQ ID | QAVRTSL |
| NO: 38 | |
| SEQ ID | YTLSQGW |
| NO: 39 | |
| SEQ ID | LAKERLS |
| NO: 40 | |
| SEQ ID | LAKERLS |
| NO: 41 | |
| SEQ ID | SVSKPFL |
| NO: 42 | |
| SEQ ID | FTLTTPK |
| NO: 43 | |
| SEQ ID | MNSTKNV |
| NO: 44 | |
| SEQ ID | VSGGHHS |
| NO: 45 | |
| SEQ ID | SAQTLAVPFKAQAQ |
| NO: 46 | |
| SEQ ID | SXXXLAVPFKAQAQ |
| NO: 47 | |
| SEQ ID | SAQXXXVPFKAQAQ |
| NO: 48 | |
| SEQ ID | SAQTLXXXFKAQAQ |
| NO: 49 | |
| SEQ ID | SAQTLAVXXXAQAQ |
| NO: 50 | |
| SEQ ID | SAQTLAVPFXXXAQ |
| NO: 51 | |
| SEQ ID | RGDX¹X²X³X⁴ |
| NO: 52 | |
| SEQ ID | TLAVPFK |
| NO: 53 | |
| SEQ ID | MAADGYLPDWLEDNLSEGIREWWDLKPGAPKPKANQQKODDGRGLVLPGYKYLGPFNGLDKGE |
| NO: 54 | PVNAADAAALEHDKAYDQQLKAGDNPYLRYNHADAEFQERLQEDTSFGGNLGRAVFQAKKRVLE |
| (AAV1 | PLGLVEEGAKTAPGKKRPVEQSPQEPDSSSGIGKTGQQPAKKRLNFGQTGDSESVPDPQPLGEPPA |
| (AAD27757)) | TPAAVGPTTMASGGGAPMADNNEGADGVGNASGNWHCDSTWLGDRVITTSTRTWALPTYNN |
| | HLYKQISSASTGASNDNHYFGYSTPWGYFDFNRFHCHFSPRDWQRLINNNWGFRPKRLNFKLFNI |
| | QVKEVTTNDGVTTIANNLTSTVQVFSDSEYQLPYVLGSAHQGCLPPFPADVFMIPQYGYLTLNNGS |
| | QAVGRSSFYCLEYFPSQMLRTGNNFTFSYTFEEVPFHSSYAHSQSLDRLMNPLIDQYLYYLNRTQN |
| | QSGSAQNKDLLFSRGSPAGMSVQPKNWLPGPCYRQQRVSKTKTDNNNSNFTWTGASKYNLNGR |
| | ESIINPGTAMASHKDDEDKFFPMSGVMIFGKESAGASNTALDNVMITDEEEIKATNPVATERFGTV |
| | AVNFQSSSTDPATGDVHAMGALPGMVWQDRDVYLQGPIWAKIPHTDGHFHPSPLMGGFGLKN |
| | PPPQILIKNTPVPANPPAEFSATKFASFITQYSTGQVSVEIEWELQKENSKRWNPEVQYTSNYAKSA |
| | NVDFTVDNNGLYTEPRPIGTRYLTRPL |
| SEQ ID | MAADGYLPDWLEDTLSEGIRQWWKLKPGPPPPKPAERHKDDSRGLVLPGYKYLGPFNGLDKGEP |
| NO: 55 | VNEADAAALEHDKAYDRQLDSGDNPYLKYNHADAEFQERLKEDTSFGGNLGRAVFQAKKRVLEPL |
| (AAV2 | GLVEEPVKTAPGKKRPVEHSPVEPDSSSGTGKAGQQPARKRLNFGQTGDADSVPDPQPLGQPPA |
| (AAC03780)) | APSGLGTNTMATGSGAPMADNNEGADGVGNSSGNWHCDSTWMGDRVITTSTRTWALPTYNN |
| | HLYKQISSQSGASNDNHYFGYSTPWGYFDFNRFHCHFSPRDWQRLINNNWGFRPKRLNFKLFNIQ |
| | VKEVTQNDGTTTIANNLTSTVQVFTDSEYQLPYVLGSAHQGCLPPFPADVFMVPQYGYLTLNNGS |
| | QAVGRSSFYCLEYFPSQMLRTGNNFTFSYTFEDVPFHSSYAHSQSLDRLMNPLIDQYLYYLSRTNTP |
| | SGTTTQSRLQFSQAGASDIRDQSRNWLPGPCYRQQRVSKTSADNNNSEYSWTGATKYHLNGRDS |
| | LVNPGPAMASHKDDEEKFFPQSGVLIFGKQGSEKTNVDIEKVMITDEEEIRTTNPVATEQYGSVST |
| | NLQRGNRQAATADVNTQGVLPGMVWQDRDVYLQGPIWAKIPHTDGHFHPSPLMGGFGLKHPP |
| | PQILIKNTPVPANPSTTFSAAKFASFITQYSTGQVSVEIEWELQKENSKRWNPEIQYTSNYNKSVNV |
| | DFTVDTNGVYSEPRPIGTRYLTRNL |
| SEQ ID | MAADGYLPDWLEDNLSEGIREWWALKPGVPQPKANQQHQDNRRGLVLPGYKYLGPGNGLDKG |
| NO: 56 | EPVNEADAAALEHDKAYDQQLKAGDNPYLKYNHADAEFQERLQEDTSFGGNLGRAVFQAKKRILE |
| (AAV3 | PLGLVEEAAKTAPGKKGAVDQSPQEPDSSSGVGKSGKQPARKRLNFGQTGDSESVPDPQPLGEPP |
| (AAC55049)) | AAPTSLGSNTMASGGGAPMADNNEGADGVGNSSGNWHCDSQWLGDRVITTSTRTWALPTYN |
| | NHLYKQISSQSGASNDNHYFGYSTPWGYFDFNRFHCHFSPRDWQRLINNNWGFRPKKLSFKLFNI |
| | QVRGVTQNDGTTTIANNLTSTVQVFTDSEYQLPYVLGSAHQGCLPPFPADVFMVPQYGYLTLNNG |
| | SQAVGRSSFYCLEYFPSQMLRTGNNFQFSYTFEDVPFHSSYAHSQSLDRLMNPLIDQYLYYLNRTQ |
| | GTTSGTTNQSRLLFSQAGPQSMSLQARNWLPGPCYRQQRLSKTANDNNNSNFPWTAASKYHLN |
| | GRDSLVNPGPAMASHKDDEEKFFPMHGNLIFGKEGTTASNAELDNVMITDEEEIRTTNPVATEQY |
| | GTVANNLQSSNTAPTTGTVNHQGALPGMVWQDRDVYLQGPIWAKIPHTDGHFHPSPLMGGFG |
| | LKHPPPQIMIKNTPVPANPPTTFSPAKFASFITQYSTGQVSVEIEWELQKENSKRWNPEIQYTSNYN |
| | KSVNVDFTVDTNGVYSEPRPIGTRYLTRNL |
| SEQ ID | MSFVDHPPDWLEEVGEGLREFLGLEAGPPKPKPNQQHQDQARGLVLPGYNYLGPGNGLDRGEP |
| NO: 57 | VNRADEVAREHDISYNEQLEAGDNPYLKYNHADAEFQEKLADDTSFGGNLGKAVFQAKKRVLEPF |
| (AAV5 | GLVEEGAKTAPTGKRIDDHFPKRKKARTEEDSKPSTSSDAEAGPSGSQQLQIPAQPASSLGADTMS |
| (AAD13756)) | AGGGGPLGDNNQGADGVGNASGDWHCDSTWMGDRVVTKSTRTWVLPSYNNHQYREIKSGSV |
| | DGSNANAYFGYSTPWGYFDFNRFHSHWSPRDWQRLINNYWGFRPRSLRVKIFNIQVKEVTVQDS |
| | TTTIANNLTSTVQVFTDDDYQLPYVVGNGTEGCLPAFPPQVFTLPQYGYATLNRDNTENPTERSSFF |
| | CLEYFPSKMLRTGNNFEFTYNFEEVPFHSSFAPSQNLFKLANPLVDQYLYRFVSTNNTGGVQFNKN |
| | LAGRYANTYKNWFPGPMGRTQGWNLGSGVNRASVSAFATTNRMELEGASYQVPPQPNGMTN |
| | NLQGSNTYALENTMIFNSQPANPGTTATYLEGNMLITSESETQPVNRVAYNVGGQMATNNQSST |
| | TAPATGTYNLQEIVPGSVWMERDVYLQGPIWAKIPETGAHFHPSPAMGGFGLKHPPPMMLIKNT |
| | PVPGNITSFSDVPVSSFITQYSTGQVTVEMEWELKKENSKRWNPEIQYTNNYNDPQFVDFAPDST |
| | GEYRTTRPIGTRYLTRPL |
| SEQ ID | MAADGYLPDWLEDNLSEGIREWWDLKPGAPKPKANQQKQDDGRGLVLPGYKYLGPFNGLDKGE |
| NO: 58 | PVNAADAAALEHDKAYDQQLKAGDNPYLRYNHADAEFQERLQEDTSFGGNLGRAVFQAKKRVLE |
| (AAV6 | PFGLVEEGAKTAPGKKRPVEQSPQEPDSSSGIGKTGQQPAKKRLNFGQTGDSESVPDPQPLGEPP |
| (AAB95450)) | ATPAAVGPTTMASGGGAPMADNNEGADGVGNASGNWHCDSTWLGDRVITTSTRTWALPTYN |
| | NHLYKQISSASTGASNDNHYFGYSTPWGYFDFNRFHCHFSPRDWQRLINNNWGFRPKRLNFKLF |
| | NIQVKEVTTNDGVTTIANNLTSTVQVFSDSEYQLPYVLGSAHQGCLPPFPADVFMIPQYGYLTLNN |
| | GSQAVGRSSFYCLEYFPSQMLRTGNNFTFSYTFEDVPFHSSYAHSQSLDRLMNPLIDQYLYYLNRTQ |
| | NQSGSAQNKDLLFSRGSPAGMSVQPKNWLPGPCYRQQRVSKTKTDNNNSNFTWTGASKYNLN |
| | GRESIINPGTAMASHKDDKDKFFPMSGVMIFGKESAGASNTALDNVMITDEEEIKATNPVATERFG |
| | TVAVNLQSSSTDPATGDVHVMGALPGMVWQDRDVYLQGPIWAKIPHTDGHFHPSPLMGGFGL |
| | KHPPPQILIKNTPVPANPPAEFSATKFASFITQYSTGQVSVEIEWELQKENSKRWNPEVQYTSNYAK |
| | SANVDFTVDNNGLYTEPRPIGTRYLTRPL |
| SEQ ID | MAADGYLPDWLEDNLSEGIREWWDLKPGAPKPKANQQKQDNGRGLVLPGYKYLGPFNGLDKGE |
| NO: 59 | PVNAADAAALEHDKAYDQQLKAGDNPYLRYNHADAEFQERLQEDTSFGGNLGRAVFQAKKRVLE |
| (AAV7 | PLGLVEEGAKTAPAKKRPVEPSPQRSPDSSTGIGKKGQQPARKRLNFGQTGDSESVPDPQPLGEPP |
| (AF513851_ | AAPSSVGSGTVAAGGGAPMADNNEGADGVGNASGNWHCDSTWLGDRVITTSTRTWALPTYNN |
| 2)) | HLYKQISSETAGSTNDNTYFGYSTPWGYFDFNRFHCHFSPRDWQRLINNNWGFRPKKLRFKLFNI |
| | QVKEVTTNDGVTTIANNLTSTIQVFSDSEYQLPYVLGSAHQGCLPPFPADVFMIPQYGYLTLNNGS |
| | QSVGRSSFYCLEYFPSQMLRTGNNFEFSYSFEDVPFHSSYAHSQSLDRLMNPLIDQYLYYLARTQSN |
| | PGGTAGNRELQFYQGGPSTMAEQAKNWLPGPCFRQQRVSKTLDQNNNSNFAWTGATKYHLNG |
| | RNSLVNPGVAMATHKDDEDRFFPSSGVLIFGKTGATNKTTLENVLMTNEEEIRPTNPVATEEYGIVS |
| | SNLQAANTAAQTQVVNNQGALPGMVWQNRDVYLQGPIWAKIPHTDGNFHPSPLMGGFGLKH |
| | PPPQILIKNTPVPANPPEVFTPAKFASFITQYSTGQVSVEIEWELQKENSKRWNPEIQYTSNFEKQTG |
| | VDFAVDSQGVYSEPRPIGTRYLTRNL |
| SEQ ID | MAADGYLPDWLEDNLSEGIREWWALKPGAPKPKANQQKQDDGRGLVLPGYKYLGPFNGLDKGE |
| NO: 60 | PVNAADAAALEHDKAYDQQLQAGDNPYLRYNHADAEFQERLQEDTSFGGNLGRAVFQAKKRVLE |
| (AAV8 | PLGLVEEGAKTAPGKKRPVEPSPQRSPDSSTGIGKKGQQPARKRLNFGQTGDSESVPDPQPLGEPP |
| (AF513852_ | AAPSGVGPNTMAAGGGAPMADNNEGADGVGSSSGNWHCDSTWLGDRVITTSTRTWALPTYN |
| 2)) | NHLYKQISNGTSGGATNDNTYFGYSTPWGYFDFNRFHCHFSPRDWQRLINNNWGFRPKRLSFKLF |
| | NIQVKEVTQNEGTKTIANNLTSTIQVFTDSEYQLPYVLGSAHQGCLPPFPADVFMIPQYGYLTLNNG |
| | SQAVGRSSFYCLEYFPSQMLRTGNNFQFTYTFEDVPFHSSYAHSQSLDRLMNPLIDQYLYYLSRTQT |
| | TGGTANTQTLGFSQGGPNTMANQAKNWLPGPCYRQQRVSTTTGQNNNSNFAWTAGTKYHLN |
| | GRNSLANPGIAMATHKDDEERFFPSNGILIFGKQNAARDNADYSDVMLTSEEEIKTTNPVATEEYGI |
| | VADNLQQONTAPQIGTVNSQGALPGMVWQNRDVYLQGPIWAKIPHTDGNFHPSPLMGGFGLK |
| | HPPPQILIKNTPVPADPPTTFNQSKLNSFITQYSTGQVSVEIEWELQKENSKRWNPEIQYTSNYYKST |
| | SVDFAVNTEGVYSEPRPIGTRYLTRNL |
| SEQ ID | MAADGYLPDWLEDNLSEGIREWWALKPGAPQPKANQQHQDNARGLVLPGYKYLGPGNGLDKG |
| NO: 61 | EPVNAADAAALEHDKAYDQQLKAGDNPYLKYNHADAEFQERLKEDTSFGGNLGRAVFQAKKRLLE |
| (AAV9 | PLGLVEEAAKTAPGKKRPVEQSPQEPDSSAGIGKSGAQPAKKRLNFGQTGDTESVPDPQPIGEPPA |
| (AAS99264)) | APSGVGSLTMASGGGAPVADNNEGADGVGSSSGNWHCDSQWLGDRVITTSTRTWALPTYNNH |
| | LYKQISNSTSGGSSNDNAYFGYSTPWGYFDFNRFHCHFSPRDWQRLINNNWGFRPKRLNFKLFNI |
| | QVKEVTDNNGVKTIANNLTSTVQVFTDSDYQLPYVLGSAHEGCLPPFPADVFMIPQYGYLTLNDGS |
| | QAVGRSSFYCLEYFPSQMLRTGNNFQFSYEFENVPFHSSYAHSQSLDRLMNPLIDQYLYYLSKTING |
| | SGQNQQTLKFSVAGPSNMAVQGRNYIPGPSYRQQRVSTTVTQNNNSEFAWPGASSWALNGRN |
| | SLMNPGPAMASHKEGEDRFFPLSGSLIFGKQGTGRDNVDADKVMITNEEEIKTTNPVATESYGQV |
| | ATNHQSAQAQAQTGWVQNQGILPGMVWQDRDVYLQGPIWAKIPHTDGNFHPSPLMGGFGM |
| | KHPPPQILIKNTPVPADPPTAFNKDKLNSFITQYSTGQVSVEIEWELQKENSKRWNPEIQYTSNYYK |
| | SNNVEFAVNTEGVYSEPRPIGTRYLTRNL |
| SEQ ID | MAADGYLPDWLEDNLSEGIREWWDLKPGAPKPKANQQKQDDGRGLVLPGYKYLGPFNGLDKGE |
| NO: 62 | PVNAADAAALEHDKAYDQQLKAGDNPYLRYNHADAEFQERLQEDTSFGGNLGRAVFQAKKRVLE |
| (AAV10 | PLGLVEEAAKTAPGKKRPVEPSPQRSPDSSTGIGKKGQQPAKKRLNFGQTGESESVPDPQPIGEPP |
| (AAT46337)) | AGPSGLGSGTMAAGGGAPMADNNEGADGVGSSSGNWHCDSTWLGDRVITTSTRTWALPTYN |
| | NHLYKQISNGTSGGSTNDNTYFGYSTPWGYFDFNRFHCHFSPRDWQRLINNNWGFRPKRLSFKLF |
| | NIQVKEVTQNEGTKTIANNLTSTIQVFTDSEYQLPYVLGSAHQGCLPPFPADVFMIPQYGYLTLNNG |
| | SQAVGRSSFYCLEYFPSQMLRTGNNFEFSYTFEDVPFHSSYAHSQSLDRLMNPLIDQYLYYLSRTQS |
| | TGGTQGTQQLLFSQAGPANMSAQAKNWLPGPCYRQQRVSTTLSQNNNSNFAWTGATKYHLNG |
| | RDSLVNPGVAMATHKDDEERFFPSSGVLMFGKQGAGRDNVDYSSVMLTSEEEIKTTNPVATEQY |
| | GVVADNLQQANTGPIVGNVNSQGALPGMVWQNRDVYLQGPIWAKIPHTDGNFHPSPLMGGF |
| | GLKHPPPQILIKNTPVPADPPTTFSQAKLASFITQYSTGQVSVEIEWELQKENSKRWNPEIQYTSNYY |
| | KSTNVDFAVNTEGTYSEPRPIGTRYLTRNL |
| SEQ ID | MAADGYLPDWLEDNLSEGIREWWALKPGAPQPKANQQHQDNARGLVLPGYKYLGPGNGLDKG |
| NO: 63 | EPVNEADAAALEHDKAYDQQLKAGDNPYLKYNHADAEFQERLKEDTSFGGNLGRAVFQAKKRLLE |
| (AAVhu.68) | PLGLVEEAAKTAPGKKRPVEQSPQEPDSSVGIGKSGAQPAKKRLNFGQTGDTESVPDPQPIGEPPA |
| | APSGVGSLTMASGGGAPVADNNEGADGVGSSSGNWHCDSQWLGDRVITTSTRTWALPTYNNH |
| | LYKQISNSTSGGSSNDNAYFGYSTPWGYFDFNRFHCHFSPRDWQRLINNNWGFRPKRLNFKLFNI |
| | QVKEVTDNNGVKTIANNLTSTVQVFTDSDYQLPYVLGSAHEGCLPPFPADVFMIPQYGYLTLNDGS |
| | QAVGRSSFYCLEYFPSQMLRTGNNFQFSYEFENVPFHSSYAHSQSLDRLMNPLIDQYLYYLSKTING |
| | SGQNQQTLKFSVAGPSNMAVQGRNYIPGPSYRQQRVSTTVTQNNNSEFAWPGASSWALNGRN |
| | SLMNPGPAMASHKEGEDRFFPLSGSLIFGKQGTGRDNVDADKVMITNEEEIKTTNPVATESYGQV |
| | ATNHQSAQAQAQTGWVONQGILPGMVWQDRDVYLQGPIWAKIPHTDGNFHPSPLMGGFGM |
| | KHPPPQILIKNTPVPADPPTAFNKDKLNSFITQYSTGQVSVEIEWELQKENSKRWNPEIQYTSNYYK |
| | SNNVEFAVNTEGVYSEPRPIGTRYLTRNL* |
| SEQ ID | MAADGYLPDWLEDNLSEGIREWWALQPGAPKPKANQQHQDNARGLVLPGYKYLGPGNGLDKG |
| NO: 64 | EPVNAADAAALEHDKAYDQQLKAGDNPYLKYNHADAEFQERLKEDTSFGGNLGRAVFQAKKRLLE |
| (AAVLK03) | PLGLVEEAAKTAPGKKRPVDQSPQEPDSSSGVGKSGKQPARKRLNFGQTGDSESVPDPQPLGEPP |
| | AAPTSLGSNTMASGGGAPMADNNEGADGVGNSSGNWHCDSQWLGDRVITTSTRTWALPTYN |
| | NHLYKQISSQSGASNDNHYFGYSTPWGYFDFNRFHCHFSPRDWQRLINNNWGFRPKKLSFKLFNI |
| | QVKEVTQNDGTTTIANNLTSTVQVFTDSEYQLPYVLGSAHQGCLPPFPADVFMVPQYGYLTLNNG |
| | SQAVGRSSFYCLEYFPSQMLRTGNNFQFSYTFEDVPFHSSYAHSQSLDRLMNPLIDQYLYYLNRTQ |
| | GTTSGTTNQSRLLFSQAGPQSMSLQARNWLPGPCYRQQRLSKTANDNNNSNFPWTAASKYHLN |
| | GRDSLVNPGPAMASHKDDEEKFFPMHGNLIFGKEGTTASNAELDNVMITDEEEIRTTNPVATEQY |
| | GTVANNLQSSNTAPTTRTVNDQGALPGMVWQDRDVYLQGPIWAKIPHTDGHFHPSPLMGGFG |
| | LKHPPPQIMIKNTPVPANPPTTFSPAKFASFITQYSTGQVSVEIEWELQKENSKRWNPEIQYTSNYN |
| | KSVNVDFTVDTNGVYSEPRPIGTRYLTRPL* |
| SEQ ID | MAADGYLPDWLEDTLSEGIRQWWKLKPGPPPPKPAERHKDDSRGLVLPGYKYLGPFNGLDKGEP |
| NO: 65 | VNEADAAALEHDKAYDRQLDSGDNPYLKYNHADAEFQERLKEDTSFGGNLGRAVFQAKKRVLEPL |
| (AAVhu.1 | GLVEEPVKTAPGKKRPVEHSPVEPDSSSGTGKAGQQPARKRLNFGQTGDADSVPDPQPLGQPPA |
| (AAS99260)) | ÅPSGLGSTTMATGSGAPMADNNEGADGVGNSSGNWHCDSQWLGDRVITTSTRTWALPTYNN |
| | HLYKQISSQSGASNDNHYFGYSTPWGYFDFNRFHCHFSPRDWQRLINNNWGFRPKRLNFKLFNIQ |
| | VKEVTQNGGTTTIANNLTSTVQVFTDSEYQLPYVLGSAHQGCLPPFPADVFMVPQYGYLTLNNGS |
| | QAVGRSSFYCLEYFPSQMLRTGNNFQFSYTFEDVPFHSSYAHSQSLDRLMNPLIDQYLYYLNKTQT |
| | NSGTLQQSRLLFSQAGPTNMSLQAKNWLPGPCYRQQRLSKQANGNNNSNFPWTAATKYHLNG |
| | RDSLVNPGPAMASHKDDEEKFFPMHGTLIFGKQGTNANDADLENVMITDEEEIRATNPVATEQY |
| | GTVSNNLQNSNTGPTTGTVNHQGALPGMVWQDRDVYLQGPIWAKIPHTDGHFHPSPLTGGFGL |
| | KHPPPQIMIKNTPVPANPPTNFSSAKFASFITQYSTGQVSVEIEWELQKENSKRWNPEIQYTSNYNK |
| | SVNVDFTVDTNGVYSEPRPIGTRYLTRNL |
| SEQ ID | MAADGYPPDWLEDTLSEGIRQWWKLKPGPPPPKPAERHKDDSRGLVLPGYKYLGPFNGLDKGEP |
| NO: 66 | VNEADAAALEHDKAYDRQLDSGDNPYLKYNHADAEFQERLKEDTSFGGNLGRAVFQAKKRVLEPL |
| (AAVhu.2 | GLVEEPVKTAPGKKRPVEHSPVEPDSSSGTGKAGQRPARKRLNFGQTGDADSVPDPQPLGQPPAA |
| (AAS99270)) | PSGLGSTTMATGSGAPMADNNEGADGVGNSSGNWHCDSQWLGDRVITTSTRTWALPTYNNHL |
| | YKQISSQSGASNDNHYFGYSTPWGYFDFNRFHCHFSPRDWQRLINNNWGFRPKRLNFKLFNIQVK |
| | EVTQNDGTTTIANNLTSTVQVFTDSEYQLPYVLGSAHQGCLPPFPADVFMVPQYGYLTLNNGSQA |
| | VGRSSFYCLEYFPSQMLRTGNNFQFSYTFEDVPFHSSYAHSQSLDRLMNPLIDQYLYYLNKTQTNSG |
| | TLQQSRLLFSQAGPTNMSLQAKNWLPGPCYRQQRLSKQANDNNNSNFPWTAATKYHLNGRDSL |
| | VNPGPAMASHKDDEEKFFPMHGTLIFGKQGTNANDADLENVMITDEEEIRATNPVATEQYGTVS |
| | NNLQNSNTGPTTGTVNRQGALPGMVWQDRDVYLQGPIWAKIPHTDGHFHPSPLMGGFGLKHP |
| | PPQIMIKNTPVPANPPTNFSSAKFASFITQYSTGQVSVEIEWELQKENSKRWNPEIQYTSNYNKSVN |
| | VDFTVDTNGVYSEPRPIGTRYLTRNL |
| SEQ ID | MAADGYLPDWLEDTLSEGIRQWWKLKPGPPPPKPAERHKDDSRGLVLPGYKYLGPFNGLDKGEP |
| NO: 67 | VNEADAAALEHDKAYDRQLDSGDNPYLKYNHADAEFQERLKEDTSFGGNLGRAVFQAKKRVLEPL |
| (AAVhu.3 | RPGLRKPVKTAPGKKRPVEHSPVEPDSSSGTGKAGQQPARKRLNFGQTGDADSVPDPQPLGQPP |
| (AAS99280)) | AAPSGLGSTTMATGSGAPMADNNEGADGVGNSSGNWHCDSQWLDDRVIATSTRTWALPTYN |
| | NHLYKQISSQSGACNDNHYFGYSTPWGYFDFNRFHCHFSPRDWQRLINSNWGFRPKRLNFKLFNI |
| | QVKEVTQNDGTTTIANNLTSTVQVFTDSEYQLPYVPGSAHQGCLPPFPADVFMVPQYGYLTLNNG |
| | SQAVGRSSFYCLEYFPSQMLRTGNNFQFSYTFEDVPFHSSYAHCQSLDRLMNPLIDQYLYYLNKTQ |
| | TNSGTLQQSRLLFSQAGPTNMSLQAKNWLPGPCYRQQRLSKQANDNNNCNFPWTAATKYHLN |
| | GRDSLVNPGPAMASHKDDEEKFFPMHGTLIFGKQGTNANDADLENVMITDEEEIRPTNPVATEQ |
| | YGTVSNNLQNSNTGPTTGTVNHQGALPGMVWQDRDVYLQGPIWAKIPHTDGHFHPSPLMGGF |
| | GLKHPPPQIMIKSTPVPANPPTNFSSAKFASSITQYSTGQVSVEIEWELQKENSKRWNPEIQYTSNY |
| | NKSVNVDFTVDTNGVYSEPRPIGTRYLTRNL |
| SEQ ID | MAADGYLPDWLEDTLSEGIRQWWKLKPGPPPPKPAERHKDDSRGLVLPGYKYLGPFNGLDKGEP |
| NO: 68 | VNEADAAALEHDKAYDRQLDSGDNPYLKYNHADAEFQERLKEDTSFGGNLGRAVFQAKKRVLEPL |
| (AAVhu.4 | GLVEEPVKTAPGKKRPVEHSPVEPDSSSGTGKAGQQPARKRLNFGQTGDADSVPDPQPLGQPPA |
| (AAS99287)) | APSGLGSTTMATGSGAPMADNNEGADGVGNSSGNWHCDSQWLGDRVITTSTRTWALPTYNN |
| | HLYKQISSQSGASNDNHYFGYSTPWGYFDFNRFHCHFSPRDWQRLVNNNRGFRPKRLNFKLFNIQ |
| | VKEVTQNDGTTTIANNLTSTVQVFTDSEYQLPYVLGSAHQGCLPPFPADVFMVPQYGYLTLNNGS |
| | QAVGRSSFYCLEYFPSQMLRTGNNFQFSYTFEDVPFHSSYAHSQSLDRLMNPLIDQYLYYLNKTQT |
| | NSGTLQQSRLLFSQAGPTNMSLQAKNWLPGPCYRQQRLSKQANDNNNSNFPWTAATKYHLNGR |
| | DSLVNPGPAMASHKDDEEKFFPMHGTLIFGKQGTNANDADLENVMITDEEEIRATNPVATEQYG |
| | TVSNNLQNSNTGPTTGTVNHQGALPGMVWQDRDVYLQGPIWAKIPHTDGHFHPSPLMGGFGL |
| | KHPPPQIMIKNTPVPANPPTNFSSAKFASFITQYSTGQVSVEIEWELQKENSKRWNPEIQYTSNYNK |
| | SVNVDFTVDTNGVYSEPRPIGTRYLTRNL |
| SEQ ID | MAADGYLPDWLEDNLSEGIREWWDLKPGAPKPKANQQKQDDGRGLVLPGYKYLGPFNGLDKGE |
| NO: 69 | PVNAADAAALEHDKAYDQQLKAGDNPYLRYNHADAEFQERLQEDTSFGGNLGRAVFQAKKRVLE |
| (AAVhu.6 | PLGLVEEGAKTAPGKKRPVEPSPQRSPDSSTGIGKTGQQPAKKRLNFGQTGDSESVPDPQPIGEPP |
| (AAS99306)) | AGPSGLGSGTMAAGGGAPMADNNEGADGVGSSSGNWHCDSAWLGDRVITTSTRPWALPTYN |
| | NHLYKQISNGTSGGSTNDNTYFGYSTPWGYFDFNRFHCHFSPRDWQRLINNNWGFRPKRLNFKL |
| | FNIQVKEVTQNEGTKTIANNLTSTIQVFTDSEYQLPYVLGSAHQGCPPPFPADVFMIPQYGYLTLNN |
| | GSQAVGRSSFYCLEYFPSQMRRTGNNFEFSYQFEDVPFHSSYAHSQSLDRLMNPLIDQYLYYLSRT |
| | QSTGGTAGTQQLLFSQAGPNNMSAQAKNWLPGPCYRQQRVSTTLSQNNNSNFAWTGATKYHL |
| | NGRDSLVNPGVAMATHKDDEERFFPSSGVLMFGKQGAGKDNVDYSSVMLTSEEEIKTTNPVATE |
| | QYGVVADNLQQQNAAPIVGAVNSQGALPGMVWQNRDVYLQGPIWAKIPHTDGNFHPSPLMG |
| | GFGLKHPPPQILIKNTPVPADPPTTFSQAKLASFITQYSTGQVSVEIEWELQKENSKRWNPEIQYTSN |
| | YYKSTNVDFAVNTEGTYSEPRPIGTRYLTRNL |
| SEQ ID | MAADGYLPDWLEDTLSEGIRQWWKLKPGPPPPKPAERHKDDSRGLVLPGYKYLGPFNGLDKGEP |
| NO: 70 | VNEADAAALEHDKAYDRQLDSGDNPYLKYNHADAEFQERLKEDTSFGGNLGRAVFQAKKRVLEPL |
| (AAVhu.7 | GLVEGPVKTAPGKKRPVEHSPAEPDSSSGTGKAGQQPARKRLNFGQTGDADSVPDPQPLGQPPA |
| (AAS99313)) | APSGLGSTTMATGSGAPMADNNEGADGVGNSSGNWHCDSQWLGDRVITTSTRTWALPTYNN |
| | HLYKQISSQSGASNDNHYFGYSTPWGYFDFNRFHCHFSPRDWQRLINNNWGFRPKRLNFKLFNIQ |
| | VKEVTQNDGTTTIANNLTSTVQVFTDSEYQLPYVLGSAHQGCLPPFPADVFMVPQYGYLTLNNGS |
| | QAVGRSSFYCLEYFPSQMLRTGNNFQFSYTFEDVPFHSSYAHSQSLDRLMNPLIDQYLYYLNKTQS |
| | NSGTLQQSRLLFSQAGPTSMSLQAKNWLPGPCYRQQRLSKQANDNNNSNFPWTAATKYHLNGR |
| | DSLVNPGPAMASHKDDEEKFFPMHGTLIFGKQGTNANDADLDNVMITDEEEIRTTNPVATEQYG |
| | YVSNNLQNSNTGPTTGTVNHQGALPGMVWQDRDVYLQGPIWAKIPHTDGHFHPSPLMGGFGL |
| | KHPPPQIMIKNTPVPANPPTNFSSAKFASFITQYSTGQVSVEIEWELQKENSKRWNPEIQYTSNYNK |
| | SVNVDFTVDTNGVYSEPRPIGTRYLTRNL |
| SEQ ID | MAADGYLPDWLEDTLSEGIRQWWKLKPGPPPPKPAERHQDNSRGLVLPGYKYLGPSNGLDKGEP |
| NO: 71 | VNEADAAALEHDKAYDRQLDSGDNPYLKYNHADAEFQERLKEDTSFGGNLGRAVFQAKKRVLEPL |
| (AAVhu.9 | GLVEEPVKTAPGKKRPVEHSPVEPDSSSGTGKAGHQPARKRLNFGQTGDADSVPDPQPLGQPPA |
| (AAS99314)) | APTSLGSTTMATGSGAPMADNNEGADGVGNSSGNWHCDSQWLGDRVITTSTRTWALPTYNNH |
| | LYKQISSQSGASNDNHYFGCSTPWGYFDFNRFHCHFSPRDWQRLINNNWGFRPKRLNFKLFNIQV |
| | KEVTQNDGTTTIANNLTSTVQVFTDSEYPLPYVLGSAHQGCLPPFPADVFMVPQYGYLTLNNGSQ |
| | AVGRSSFYCLEYFPSQMLRTGNNFTFSYTFEDVPFHSSYAHSQSLDRLMNPLIDQYLYYLNRTQSNS |
| | GTLQQSRLLFSQAGPTSMSLQAKNWLPGPCYRQQRLSKQANDNNNSNFPWTAATKYHLNGRDS |
| | LVNPGPAMASHKDDEEKFFPMHGTLIFGKQGTNANDADLEHVMITDEEEIRTTNPVATEQYGNV |
| | SNNLQNSNTGPTTENVNHQGALPGMVWQDRDVYLQGPIWAKIPHTDGHFHPSPLMGGFGLKH |
| | PPPQIMIKNTPVPANPPTNFSSAKFASFITQYSTGQVSVEIEWELQKENSKRWNPEIQYTSNYNKSV |
| | NVDFTVDTNGVYSEPCPIGTRYLTRNL |
| SEQ ID | MAADGYLPDWLEDTLSEGIRQWWKLKPGPPPPKLAERHQDDSRGLVLPGYKYLGPFNGLDKGEP |
| NO: 72 | VNEADAAALEHDKAYDRQLDSGDNPYLKYNHADAEFQERLKEDTSFGGNLGRAVFQAKKRVLEPL |
| (AAVhu.10 | GLVEEPVKTAPGKKRPVEHSPVEPDSSSGTGKAGHQPARKRLNFGQTGDADSVPDPQPLGQPPA |
| (AAS99261)) | APTSLGSTTMATGSGAPMADNNEGADGVGNSSGNWHCDSQWLGDRVITTSTRTWALPTYNNH |
| | LYKQISSQSGASNDNHYFGYSTPWGYFDFNRFHCHFSPRDWQRLINNNWGFRPKRLNFKLFNIQV |
| | KEVTQNDGTTTIANNLTSTVQVFTDSEYQLPYVLGSAHQGCLPPFPADVFTVPQYGYLTLNNGSQA |
| | VGRSSFYCLEYFPSQMLRTGNNLTFSYTFEDVPFHSSYAHSQSLDRLMNPLIDQYLYYLNRTQSNSG |
| | TLQQSRLLFSQAGPTSMSLQAKNWLPGPCYRQQRLSKQANDNNNSNFPWTAATKYHLNGRDSL |
| | VNPGPAMASHKDDEEKFFPMHGTLIFGKQGTNANDADLEHVMITDEEEIRTTNPVATEQYGNVS |
| | NNLQNSNTGPTTENVNHQGALPGMVWQDRDVYLQGPIWAKIPHTDGHFHPSPLMGGFGLKHP |
| | PPQIMIKNTPVPANPPTNYSSAKFASFITQYSTGQVSVEIEWELRKENSKRWNPEIQYTSNYNKSVN |
| | VDFTVDTNGVYSEPRPIGTRYLTRNL |
| SEQ ID | MAADGYLPDWLEDTLSEGIRQWWKLKPGPPPPKPAERHQDDSRGLVLPGYKYLGPFNGLDKGEP |
| NO: 73 | VNEADAAALEHDKAYDRQLDSGDNPYLKYNHADAEFQERLKEDTSFGGNLGRAVFQAKKRVLEPL |
| (AAVhu.11 | GLVEEPVKTAPGKKRPVEHSPVEPDSSSGTGKAGHQPARKRLNFGQTGDADSVPDPQPLGQPPA |
| (AAS99262)) | APTSLGSTTMATGSGAPMADNNEGADGVGNSSGNWHCDSQWLGDRVITTSTRTWALPTYNNH |
| | LYKQISSQSGASNDNHYFGYSTPWGYFDFNRFHCHFSPRDWQRLINNNWGFRPKRLNFKLFNIQV |
| | KEVTQNDGTTTIANNLTSTVQVFTDSEYQLPYVLGSAHQGCLPPFPADVFMVPQYGYLTLNNGSQ |
| | AVGRSSFYCLEYFPSQMLRTGNNFTFSYTFEDVPFHSSYAHSQSLDRLMNPLIDQYLYYLNRTQSNS |
| | GTLQQSRLLFSQAGPTSMSLQAKNWLPGPCYRQQRLSKQANDNNNSNFPWTAATKYRLNGRDS |
| | LVNPGPAMASHKDDEEKFFPMHGTLIFGKQGTNANDADLEHVMITDEEEIRTTNPVATEQYGNV |
| | SNNLQNSNTGPTTENVNHQGALPGMVWQDRDVYLQGPIWAKIPHTDGHFHPSPLMGGFGLKH |
| | PPPQIMIKNTPVPANPPTNFSSAKFASFITQYSTGQVSVEIEWELQKENSKRWNPEIQYTSNYNKSV |
| | NVDFTVDTNGVYSEPRPIGTRYLTRNL |
| SEQ ID | MAADGYLPDWLEDTLSEGIRQWWKLKPGPPPPKPAERHKDDSRGLVLPGYKYLGPFNGLYKGEP |
| NO: 74 | VDEADAAALEHDKAYDRQLDSGDNPYLKYNHADAEFQERLKEDTSFGGNLGRAVFQAKKRVLEPL |
| (AAVhu.15 | GLVGEPVKTAPGKKRPVEHSPVEPDSSSGTGKAGNQPARKRLNFGQTGDADSVPDPQPLGQPPA |
| (AAS99265)) | APSGLGSTTMATGSGAPVADNNEGADGVGNSSGNWHCDSQWLGDRVITTSTRTWALPTYNNH |
| | LYKQISSQSGASNDNHYFGYSTPWGYFDFNRFHCHFSPRDRQRLINNNWGFRPKRLNFKLFNIQV |
| | KEVTQNDGTTTIANNLTSTVQVFTDSGYQLPYVLGLAHQGCLPPFPADVFMVPQYGYLTLNNGSQ |
| | AVGRSSFYCLEYFPSQMLRTGNNFQFSYTFEDVPFHSSYAHSQSLDRLMNPLIDQYLYYLNKTQSNS |
| | GTLQQSRLLFSQAGPTSMSLQAKNWLPGPCYRQQRLSKQANDNNNSNFPWTAATKYHLNGRDS |
| | LVNPGPAMASHKDDEEKFFPMHGTLIFGKQGTNANDADLDNVMITDEEEIRTTNPVATEQYGYV |
| | SNNLQNSNTGPTTGTVNHQGALPGMVWQDRDVYLQGPIWAKIPHTDGHFHPSPLMGGFGLKH |
| | PPPQIMIKNTPVPANPPTNFSSAKFASFITQYSTGQVSVEIEWELQKEDSKRWNPEIQYTSNYNKPV |
| | NVDFTVDTNGVYSEPRPIGTRYLTRNL |
| SEQ ID | MAADGYLPDWLEDTLSEGIRQWWKLKPGPPPPKPAERHKDDSRGLVLPGYKYLGPFNGLYKGEP |
| NO: 75 | VNEADAAALEHDKAYDRQLDSGDNPYLKYNHAGAEFQERLKEDTSFGGNLGRAVFQAKKRVLEPL |
| (AAVhu.16 | GLVEEPVKTAPGKKRPVEHSPVEPDSSSGTGKAGNQPARKRLNFGQTGDADSVPDPQPLGQPPA |
| (AAS99266)) | APSGLGSTTMATGSGAPVADNNEGADGVGNSSGNWHCDSQWLGDRVITTSTRTWALPTYNNH |
| | LYKQISSQSGASNDNHYFGYSTPWGYFDFNRFHCHFSPRDWQRLINNNWGFRPKRLNFKLFNIQV |
| | KEVTQNDGTTTIANNLTSTVQVFTDSEYQLPYVLGSAHQGCLPPFPADVFMVPQYGYLTLNNGSQ |
| | AVGRSSFYCLEYFPSQMLRTGNNFQFSYTFEDVPFHSSYAHSQSLDRLMNPLIDQYLYYLNKTQSNS |
| | GTLQQSRLLFSQAGPTSMSLQAKNWLPGPCYRQQRLSKQANDNNNSNFPWTAATKYHLNGRDS |
| | LVNPGPAMASHKDDEEKFFPMHGTLIFGKQGTNANDADLDNVMITDEEEIRTTNPVATEQYGYV |
| | SNNLQDSNTGPTTGTVNHQGALPGMVWQDRDVYLQGPIWAKIPHTDGHFHPSPLMGGFGLKH |
| | PPPQIMIKNTPVPANPPTNFSSAKFASFITQYSTGQVSVEIEWELQKENSKRWNPEIQYTSNYNKSV |
| | NVDFTVDTNGVYSEPRPIGTRYLTRNL |
| SEQ ID | MAADGYLPDWLEDNLSEGIREWWDLKPGAPKPKANQQKQDDGRGLVLPGCKYLGPFNGLDKGE |
| NO: 76 | PVNAADAAALEHDKAYDQQLKAGDNPYLRYNHADAEFQERLQEDTSFGGNLGRAVFQAKKRVLE |
| (AAVhu.17 | PLGLVEEGAKTAPGKKRPVEPSPQRSPDSSTGIGKTGQQPAKKRLNFGQTGDSESVPDPQPIGEPP |
| (AAS99267)) | AGPSGLGSGTMAAGGGAPMADNNEGADGVGSSSGNWHCDSTWLGDRVITTSTRTWALPTYN |
| | NHLYKQISNGTSGGSTNDNTYFGYSTPWGYFDFNRFHCHFSPRDWQRLINNNWGFRPKRLNFKL |
| | FNIQVKEVTQNEGTKTIANNLTSTIQVFTDSEYQLPYVLGSAHQGCPPPFPADVFMIPQYGYLTLNN |
| | GSQAVGRSSFYCLEYFPSQMRRTGNNFEFSYQFEDVPFHSSYAHSQSLDRLMNPLIDQYLYYLSRT |
| | QSTGGTAGTQQLLFSQAGPNNMSAQAKNWLPGPCYRQQRVSTTLSQNNNSNFAWTGATKYHL |
| | NGRDSLVNPGVAMATHKDDEERFFPSSGVLMFGKQGAGKDNVDYSSVMLTSEEEIKTTNPVATE |
| | QYGVVADNLQQQNAAPIVGAVNSQGALPGMVWQNRDVYLQGPIWAKIPHTDGNFHPSPLMG |
| | GFGLKHPPPQILIKNTPVPADPPTTFSQAKLASFITQYSTGQVSVEIEWELQKENSKRWNPEIQYTSN |
| | YNKSVNVDFTVDTNGVYSEPRPIGTRYLTRNL |
| SEQ ID | MAADGYLPDWLEDTLSEGIRQWWKLKPGPPPPKPAERHKDDSRGLVLPGYKYLGPFNGLDKGEP |
| NO: 77 | VNEADAAALEHDKAYDRQLESGDNPYLKYNHADAEFQERLKEDTSFGGNLGRAVFQAKKRVLEPL |
| (AAVhu.18 | GLVEEPVKTAPGKKRPVEHSPVEPDSSSGTGKAGQQPARKRLNFGQTGDADSVPDPQPLGQPPA |
| (AAS99268)) | APSGLGSTTMASGSGAPVADNNEGADGVGNSSGNWHCDSQWLGDRVITTSTRTWALPTYNNH |
| | LYKQISSQSGASNDNHYFGYSTPWGYFDFNRFHCHFSPRDWQRLINNSWGFRPKRLNFKLFNIQV |
| | KEVTQNDGTTTIANNLTSTVQVFTDSEYQLPYVLGSAHQGCLPPFPADVFMVPQYGYLTLNNGSQ |
| | AVGRSSFYCLEYFPSQMLRTGNNFQFSYTFEDVPFHSSYAHSQSLDRLLNPLIDQYLYYLNKTQSNS |
| | GTLQQSRLLFSQAGPTSMSLQAKNWLPGPCYRQQRLSKQANDNNNSNFPWTAATKYHLNGRDS |
| | LVNPGPAMASHKDDEEKFFPMHGTLIFGKQGTNANDADLDNVMITDEEEIRTTNPVATEQYGYV |
| | SNNLQNSNTGPTTGTVNHQGALPGMVWQDRDVYLQGPIWAKIPHTDGHFHPSPLMGGFGLKH |
| | PPPQIMIKNTPVPANPPTNFSSSKFASFITQYSTGQVSVEIEWELQKENSKRWNPEIQYTSNYNKSV |
| | NVDFTVDTNGVYSEPRPIGTRYPTRNL |
| SEQ ID | MAADGYLPDWLEDTLSEGIRQWWKLKPGPPPPKPAERHKDDSRGLVLPGYRYLGPFNGLDKGEP |
| NO: 78 | VNEADAAALEHDKAYDRQLDSGDNPYLKYNHVDAEFQERLKEDTSFGGNLGRAVFQAKKRILEPL |
| (AAVhu.20 | GLVEEPVKAAPGEKRPVEHSPAEPDSSSGTGKAGQQPARKRLNFGQTGDADSVPDPQPLGQPPA |
| (AAS99271)) | APSGLGTNTMASGSGAPMADNNEGADGVGNSSGNWHCDSTWMGDRVITTSTRTWALPTYNN |
| | HLYKQISSQSGASNDNHYFGYSTPWGHFDFNRFHCHFSPRDWQRLINNNWGFRPKRLSFKLFNIQ |
| | VKEVTQNDGTTTIANNLTSTVQVFTDSEYQLPYVLGSAHQGCLPPFPADVFMVPQYGYLTLNNGS |
| | QAVGRSSFYCLEYFPSQMLRTGNNFTFSYTFEDVPFHSSYAHSQSLDRLMNPLIDQYLYYLSRTNTP |
| | SGTTTMSRLQFSQAGASDIRDQSRNWLPGPCYRQQRVSKTAADNNNSDYSWTGATKYHLNGRD |
| | SLVNPGPAMASHKDDEEKYFPQSGVLIFGKQDSGKTNVDIEKVMITDEEEIRTTNPVATEQYGSVS |
| | TNLQSGNTQAATSDVNTQGVLPGMVWQDRDVYLQGPIWAKIPHTDGHFHPSPPMGGFGLKHP |
| | PPQILIKNTPVPANPSTTFSAAKFASFITQYSTGQVSVEIEWELQKENSKRWNPEIQYTSNYNKSVNV |
| | DFTVDTNGVYSEPRPIGARYLTRNL |
| SEQ ID | MAADGYLPDWLEDTLSEGIRQWWKLKPGPPPPKPAERHKDDSRGLVLPGYKYLGPFNGLDKGEP |
| NO: 79 | VNEADAAALEHDKAYDRQLDSGDNPYLKYNHADAEFQERLKEDTSFGGNLGRAVFQAKKRILEPL |
| (AAVhu.21 | GLVEEPVKTAPGKKRPVEHSPAEPDSSSGTGKAGQQPARKRLNFGQTGDADSVPDPRPLGQPPAA |
| (AAS99272)) | PSGLGTNTMASGSGAPMADNNEGADGVGNSSGNWHCDSTWMGDRVITTSTRTWALPTYNNH |
| | LYKQISSQSGASNDNHYFGYSTPWGYFDFNRFHCHFSPRDWQRLINNNWGFRPKRLSFKLFNIQV |
| | KEVTQNDGTTTIANNLTSTVQVFTDSEYQLPYVLGSAHQGCLPPFPADVFMVPQYGYLTLNNGSQ |
| | AVGRSSFYCLEYFPSQMLRTGNNFTFSYTFEDVPFHSSYAHSQSLDRLMNPLIDQYLYYLSRTNTPS |
| | GTTTMSRLQFSQAGASDIRDQSRNWLPGPCYRQQRVSKTAADNNNSDYSWTGATKYHLNGRDS |
| | LVNPGPAMASHKDDEEKYFPQSGVLIFGKQDSGKTNVDIEKVMITDEEEIRTTNPVATEQYGSVST |
| | NLQSGNTQAATSDVNTQGVLPGMVWQDRDVYLQGPIWAKIPHTDGHFHPSPLMGGFGLKHPP |
| | PQILIKNTPVPANPSTTFSAAKFASFITQYSTGQVSVEIEWELQKENSKRWNPEIQYTSNYNKSVNV |
| | DFTVDTNGVYSEPRPIGTRYLTRNL |
| SEQ ID | MAADGYLPDWLEDTLSEGIRQWWKLKPGPPPPKPAERHKDDSRGLVLPGYKYLGPFNGLDKGEP |
| NO: 80 | VNEADAAALEHDKAYDRQLDSGDNPYLKYNHADAEFQERLKGDTSFGGNLGRAVFQAKKRILEPL |
| (AAVhu.22 | GLVEEPVKTAPGKKRPVEHSPAEPDSSSGTGKAGQQPARKRLNFGQTGDADSVPDPQPLGQPPA |
| (AAS99273)) | APSGLGTNTMASGSGAPMADNNEGADGVGNSSGNWHCDSTWMGGRVITTSTRTWALPTYNN |
| | HLYKQISSQSGASNDNHYFGYSTPWGYFDFNRFHCHFSPRDWQRLINNNWGFRPKRLSFKLFNIQ |
| | VKEVTQNDGTTTIANNLTSTVQVFTDSEYQLPYVLGSAHQGCLPPFPADVFMVPQYGYLTLNNGS |
| | QAVGRSSFYCLEYFPSQTLRTGNNFTFSYTFEDVPFHSSYAHSQSLDRLMNPLIDQYLYYLSRTNTPS |
| | GTTTMSRLQFSQAGASDIRDQSRNWLPGPCYRQQRVSKTAADNNNSDYSWTGATKYHLNGRDS |
| | LVNPGPAMASHKDDEEKYFPQSGVLIFGKQDSGKTNVDIEKVMITDEEEIRTTNPVATEQYGSVST |
| | NLQSGNTQAATSDVNTQGVLPGMVWQDRDVYLQGPIWAKIPHTDGHFHPSPLMGGFGLKHPP |
| | PQILIKNTPVPANPSTTFSAAKFASFITQYSTGQVSVEIEWELQKENSKRWNPEIQYTSNYNKSVNV |
| | DFTVDTNGVYSEPRPIGTRYLTRNL |
| SEQ ID | MAADGYLPDWLEDTLSEGIRQWWKLKPGPPPPKPAERHKDDSRGLVLPGYKYLGPFNGLDKGEP |
| NO: 81 | VNEADAAALEHDKAYDRQLDSGDNPYLKYNHADAEFQERLKEDTSFGGNLGRAVFQAKKRILEPL |
| (AAVhu.23 | GLVEEPVKTAPGKKRPVEHSPAEPDSSSGTGKAGQQPARKRLNFGQTGDADSVPDPQPLGQPPA |
| (AAS99274)) | APSGLGTNTMASGSGAPMADNNEGADGVGNSSGNWHCDSTWMGDRVITTSTRTWALPTCNN |
| | HLYKQISSQSGASNDNHYFGYSTPWGYFDFNRFHCHFSPRDWQRLINNNWGFRPKRLSFKLFNIQ |
| | VKEVTQNDGTTTIANNLTSTVQVFTDSEYQLPYVLGSAHQGCLPPFPADVFMVPQYGYLTLNNGS |
| | QAVGRSSFYCLEYFPSQMLRTGNNFTFSYTFEDVPFHSSYAHSQSLDRLMNPLIDQYLYYLSRTNTP |
| | SGTTTMSRLQFSQAGASDIRDQSRNWLPGPCYRQQRVSKTAADNNNSDYSWTGATKYHLNGRD |
| | SLVNPGPAMASHKDDEEKYFPQSGVLIFGKQDSGKTNVDIEKVMITDEEEIRTTNPVATEQYGSVS |
| | TYLQSGNTQAATSDVNTQGVLPGMVWQDRDVYLRGPIWAKIPHTDGHFHPSPLMGGFGLKHPP |
| | PQILIKNTPVPANPSTTFSAAKFASFITQYSTGQVSVEIEWELQKENSKRWNPEIQYTSNYNKSVNV |
| | DFTVDTNGVYSEPRPIGTRYLTRNL |
| SEQ ID | MAADGYLPDWLEDTLSEGIRQWWKLKPGPPPPKPAERHKDGSRGLVLPGYKYLGPFNGLDKGEP |
| NO: 82 | VNEADAAALEHDKAYDRQLNSGDNPYLKYNHADAEFQERLKEDTSFGGNLGRAVFQAKKRVLEPL |
| (AAVhu.25 | GLVEEPVKTAPGKKRPVEHSPAEPDSSSGTGKAGQQPARKRLNFGQTGDADSVPDPQPLGQPPA |
| (AAS99276)) | APSGLGSTTMATGSGAPMADNNEGADGVGNSSGNWHCDSQWLGDRVITTSTRTWALPTYNN |
| | HLYKQISSQSGASNDNHYFGYSTPWGYFDFNRFHCHFSPRDWQRLINNNWGFRPKRLNFKLFNIQ |
| | VKEVTQNDGTTTIANNLTSTVQVFTDSEYQLPYVLGSAHQGCLPPFPADVFMVPQYGYLTLNNGS |
| | QAVGRSPFYCLEYFPSQMLRTGNNFQFSYTFEDVPFHSSYAHSQSLDRLMNPLIDQYLYYLNKTQT |
| | NSGTLQQSRLLFSQAGPTNMSLQAKNWLPGPCYRQQRLSKQANDNNNSNFPWTAATKYHLNGR |
| | DSLVNPGPAMASHKDDEEKFFPMHGTLIFGKQGTNANDADLENVMITDEEEIRTTNPVATEQYGT |
| | VSNNLQNSNTGPTTGTVNHQGALPGMVWQDRDVYLQGPIWAKIPHTDGHFHPSPLMGGFGLK |
| | HPPPQIMIKNTPVPANPPTNFSSAKFASFITQYSTGQVSVEIEWELQKENSKRWNPEIQYTSNYNKS |
| | VNVDFTVDNNGVYSEPRPIGTRYLTRNL |
| SEQ ID | MAADGYLPDWLEDTLSEGIRQWWKLKPGPPPPKPAERHKDDSRGLVLPGYKYLGPFNGLDKGEP |
| NO: 83 | VNEADAAALEHDKAYDRQLDSGDNPYLKYNHADAEFQERLKEDTSFGGNLGRAVFQAKKRILEPL |
| (AAVhu.27 | GLVEEPVKTAPGKKRPVEHSPAEPDSSSGTGKAGQQPARKRLNFGQTGDADSVPDPQPLGQPPA |
| (AAS99277)) | APSGLGTNTMASGSGAPMADNNEGADGVGNSSGNWHCDSTWMGDRVITTSTRTWALPTYNN |
| | HLYKQISSQSGASNDNHYFGYSTPWGYFDFNRFHCHFSPRDWQRLINNNWGFRPKRLSFKLFNIQ |
| | VKEVTQNDGTTTIANNLTSTVQVFTDSGYQLPYVLGSAHQGCLPPFPADVFMVPQYGYLTLNNGS |
| | QAVGRSSFYCLEYFPSQMLRTGNNFTFSYTFEDVPFHSSYAHGQSLDRLMNPLIDQYLYYLSRTNTP |
| | SGTTTMSRLQFSQAGASDVRDQSRNWLPGPCYRQQRVSKTAADNNNSDYSWTGATKYHLNGR |
| | DSLVNPGPAMASHKDDEEKYFPQSGVLVFGKQDSGKTNVDIEKVMITDEEEIRTTNPAATEQYGS |
| | VSTNLQSGNTQAATSDVNTQGVLPGMVWQDRDVYLQGPIWAKIPHTDGHFHPSPLMGGFGLK |
| | HPPPQILIKNTPVPANPSTTFSAAKFVSFITQYSTGQVSVEIEWELQKENSKRWNPEIQYTSNYNKSV |
| | NVDFTVDTNGVYSEPRPIGTRYLTRNL |
| SEQ ID | MAADGYLPDWLEDTLSEGIRQWWKLKPGPPPPKPAERHKDDSRGLVLPGYKYLGPFNGLDKGEP |
| NO: 84 | VNEADAAALEHDKAYDRQLDSGDNPYLKYNHADAEFQERLKEDTSFGGNLGRAVFQAKKRVLEPL |
| (AAVhu.28 | SLVEEPVKTAPGKKRPVEHSPAEPDSSSGTGKSGNQPARKRLNFGQTGDSDSVPDPQPLGQPPAA |
| (AAS99278)) | PSGLGTNTMATGSGAPMADNNEGADGVGNSSGNWHCDSTWMGDRVITTSTRTWALPTYNNH |
| | LYKQISSQSGASNDNHYFGYSTPWGYFDFNRFHCHFSPRDWQRLINNNWGFRPKRLNFKLFNIQV |
| | KEVTQNDGTTTIANNLTSTVQVFTDSEYQLPYVLGSAHQGCLPPFPADVFMVPQYGYLTLNNGSQ |
| | AVGRSSFYCLEYFPSQMLRTGNNFTFSYTFEDVPFHSSYAHSQSLDRLMNPLIDQYLYYLSRTNTPS |
| | GTTTQSRLQFSQAGASDIQDQSRNWLPGPCYRQQRVSKTSADNNNSEYSWTGATKYHLNGRDSL |
| | VNPGPAMASHKDDEEKFFPQSGVLIFGKQGSEKTNVDIEKVMITDEEEIRTTNPVATEQYGSVSTN |
| | LQSGNTQAATADVNTQGVLPGMVGQDRDVYLQGPTWAKIPHTDGHFHPSPLMGGFGLKHPPP |
| | QILIKNTPVPANPSTTFSAAKFASFITQYSTGQVSVEIEWELQKENSKRWNPEIQYTSNYNKSVNVD |
| | FTVDTNGVYSEPRPIGTRYLTRNL |
| SEQ ID | MAADGYLPDWLEDTLSEGIRQWWKLKPGPPPPKPAERHKDDSRGLVLPGYKYLGPFNGLDKGEP |
| NO: 85 | VNEADAAALEHDKAYDRQLDSGDNPYLKYNHADAEFQERLKEDTSFGGNLGRAVFQAKKRVLEPL |
| (AAVhu.29 | GLVEEPVKTAPGKKRPVEHSPAEPDSSSGTGKSGNQPARKRLNFGQTGDSDSVPDPQPLGQPPAA |
| (AAS99279)) | PSGLGTNTMATGSGAPMADNNEGADGVGNSSGNWHCDSTWMGDRVITTSTRTWALPTYNNH |
| | LYKQISSQSGASNDNHYFGYSTPWGYFDFNRFHCHFSPRDWQRLINNNWGFRPKRLNFKLFNIQV |
| | KEVTQNDGTTTIANNLTSTVQVFTDSEYQLPYVLGSAHQGCLPPFPADVFMVPQYGYLTLNNGSQ |
| | AVGRSSFYCLGYFPSQMLRTGNNFTFSYTFEDVPFHSSYAHSQSLDRLMNPLIDQYLYYLSRTNTPS |
| | GTTTQSRLQFSQAGASDIRDQSRNWLPGPCYRQQRVSKTSADNNNSEYSWTGATKYHLNGRDSL |
| | VNPGPAMASHKDDEEKFFPQSGVLIFGKQGPEKTNVDIEKVMITDEEEIRTTNPVATEQYGSVSTN |
| | LQSGNTQAATADVNTQGVLPGMVWQDRDVYLQGPIWAKIPHTDGHFHPSPLMGGFGLKHPPP |
| | QILIKNTPVPANPSTTFSAAKFASFITQYSTGQVSVEIEWELQKENSKRWNPEIQYTSNYNKSVNVD |
| | FTVDTNGVYSEPRPIGTRYLTRNL |
| SEQ ID | MAADGYLPDWLEDTLSEGIRQWWKLKPGPPPPKPAERHKDDSRGLVLPGYKYLGPGNGLDKGEP |
| NO: 86 | VNAADAAALEHDKAYDQQLKAGDNPYLKYNHADAEFQERLKEDTSFGGNLGRAVFQAKKRLLEPL |
| (AAVhu.31 | GLVEEAAKTAPGKKRPVEQSPQEPDSSAGIGKSGSQPAKKKLNFGQTGDTESVPDPQPIGEPPAAP |
| (AAS99281)) | SGVGSLTMASGGGAPVADNNEGADGVGSSSGNWHCDSQWLGDRVITTSTRTWALPTYNNHLY |
| | KQISNSTSGGSSNDNAYFGYSTPWGYFDFNRFHCHFSPRDWQRLINNNWGFRPKRLNFKLFNIQV |
| | KEVTDNNGVKTIANNLTSTVQVFTDSDYQLPYVLGSAHEGCLPPFPADVFMIPQYGYLTLNDGGQ |
| | AVGRSSFYCLEYFPSQMLRTGNNFQFSYEFENVPFHSSYAHSQSLDRLMNPLIDQYLYYLSKTINGS |
| | GQNQQTLKFSVAGPSNMAVQGRNYIPGPSYRQQRVSTTVTQNNNSEFAWPGASSWALNGRNS |
| | LMNPGPAMASHKEGEDRFFPLSGSLIFGKQGTGRDNVDADKVMITNEEEIKTTNPVATESYGQVA |
| | TNHQSAQAQAQTGWVQNQGILPGMVWQDRDVYLQGPIWAKIPHTDGNFHPSPLMGGFGMK |
| | HPPPQILIKNTPVPADPPTAFNKDKLNSFITQYSTGQVSVEIEWELQKENSKRWNPEIQYTSNYYKS |
| | NNVEFAVSTEGVYSEPRPIGTRYLTRNL |
| SEQ ID | MAADGYLPDWLEDTLSEGIRQWWKLKPGPPPPKPAERHKDDSRGLVLPGYKYLGPGNGLDKGEP |
| NO: 87 | VNAADAAALEHDKAYDQQLKAGDNPYLKYNHADAEFQERLKEDTSFGGNLGRAVFQAKKRLLEPL |
| (AAVhu.32 | GLVEEAAKTAPGKKRPVEQSPQEPDSSAGIGKSGSQPAKKKLNFGQTGDTESVPDPQPIGEPPAAP |
| (AAS99282)) | SGVGSLTMASGGGAPVADNNEGADGVGSSSGNWHCDSQWLGDRVITTSTRTWALPTYNNHLY |
| | KQISNSTSGGSSNDNAYFGYSTPWGYFDFNRFHCHFSPRDWQRLINNNWGFRPKRLNFKLFNIQV |
| | KEVTDNNGVKTIANNLTSTVQVFTDSDYQLPYVLGSAHEGCLPPFPADVFMIPQYGYLTLNDGSQA |
| | VGRSSFYCLEYFPSQMLRTGNNFQFSYEFENVPFHSSYAHSQSLDRLMNPLIDQYLYYLSKTINGSG |
| | QNQQTLKFSVAGPSNMAVQGRNYIPGPSYRQQRVSTTVTQNNNSEFAWPGASSWALNGRNSL |
| | MNPGPAMASHKEGEDRFFPLSGSLIFGKQGTGRDNVDADKVMITNEEEIKTTNPVATESYGQVAT |
| | NHQSAQAQAQTGWVQNQGILPGMVWQDRDVYLQGPIWAKIPHTDGNFHPSPLMGGFGMKH |
| | PPPQILIKNTPVPADPPTAFNKDKLNSFITQYSTGQVSVEIEWELQKENSKRWNPEIQYTSNYYKSN |
| | NVEFAVNTEGVYSEPRPIGTRYLTRNL |
| SEQ ID | MAADGYLPDWLEDTLSEGIRQRWKLKPGPPPPEPAERHKDDSRGLVLPGYKYLGPFNGLDKGEPV |
| NO: 88 | NEADAAALEHDKAYDRQLDSGDNPYLKYNHADAEFQERLKEDTSFGGNLGRAVFQAKKRVLEPLG |
| (AAVhu.34 | LVEEPVKTAPGKKRPVEHSPVEPDSSSGTGKAGQQPARKRLNFGQTGDADSVPDPQPLGQPPAAP |
| (AAS99283)) | SGLGTNTMATGSGAPMADNNEGADGVGNSSGNWHCDSTWMGDRVITTSTRTWALPTYNNHL |
| | YKQISSQSGASNDNHYFGYSTPWGYFDFNRFHCHFSPRDWQRLINNNWGFRPKRLNFKLFNIQVK |
| | EVTQNDGTTTIANNLTSTVQVFTDSEYQLPYVLGSAHQGCLPPFPADVFMVPQYGYLTLNNESQA |
| | VGRSSFYCLEYFPSQMLRTGNNFTFSYTFEDVPFHSSYAHSQSLGRLMNPLIDQYLYYLSRTNTPSGT |
| | TTQSRLQFSQAGASDIRDQSRNWLPGPCYRQQRVSKTSADNNNSEYSWTGATKYHLNGRDSLVN |
| | PGPAMASHKDDEEKFFPQSGVLIFGKQGSEKTNVDIEKVMITDEEEIRTTNPVATEQYGSVSTNLQ |
| | RGNRQAATADVNTQGVLPGMVWQDRDVYLQGPIWAKIPHTDGHFHPSPLMGGFGLKHPPPQI |
| | LIKNTPVPANPSTTFSAAKFASFITQYSTGQVSVEIEWELQKENSKRWNPEIQYTSNYNKSVNVDFT |
| | VDTNGVYSEPRPIGTRYLTRNL |
| SEQ ID | MAADGYLPDWLEDNLSEGIREWWDLKPGAPKPKANQQKQDDGRGLVLPGYKYLGPFNGLDKGE |
| NO: 89 | PVNAADAAALEHDKAYDQQLKAGDNPYLRYNHADAEFQERLQEDTSFGGNLGRAVFQAKKRVLE |
| (AAVhu.37 | PLGLVEEAAKTAPGKKRPVEPSPQRSPDSSTGIGKKGQQPAKKRLNFGQTGDSESVPDPQPIGEPP |
| (AAS99285)) | AGPSGLGSGTMAAGGGAPMADNNEGADGVGSSSGNWHCDSTWLGDRVITTSTRTWALPTYN |
| | NHLYKQISNGTSGGSTNDNTYFGYSTPWGYFDFNRFHCHFSPRDWQRLINNNWGFRPKRLSFKLF |
| | NIQVKEVTQNEGTKTIANNLTSTIQVFTDSEYQLPYVLGSAHQGCLPPFPADVFMIPQYGYLTLNNG |
| | SQAVGRSSFYCLEYFPSQMLRTGNNFEFSYTFEDVPFHSSYAHSQSLDRLMNPLIDQYLYYLSRTQS |
| | TGGTQGTQQLLFSQAGPANMSAQAKNWLPGPCYRQQRVSTTLSQNNNSNFAWTGATKYHLNG |
| | RDSLVNPGVAMATHKDDEERFFPSSGVLMFGKQGAGRDNVDYSSVMLTSEEEIKTTNPVATEQY |
| | GVVADNLQQTNTGPIVGNVNSQGALPGMVWQNRDVYLQGPIWAKIPHTDGNFHPSPLMGGFG |
| | LKHPPPQILIKNTPVPADPPTTFSQAKLASFITQYSTGQVSVEIEWELQKENSKRWNPEIQYTSNYYK |
| | STNVDFAVNTEGTYSEPRPIGTRYLTRNL |
| SEQ ID | MAADGYLPDWLEDNLSEGIREWWDLKPGAPKPKANQQKQDDGRGLVLPGYKYLGPFNGLDKGE |
| NO: 90 | PVNAADAAALEHDKAYDQQLKAGDNPYLRYNHADAEFQERLQEDTSFGGNLGRAVFQAKKRVLE |
| (AAVhu.39 | PLGLVEEGAKTAPGKKRPVEPSPQRSPDSSTGIGKKGQQPARKRLNFGRTGDSESVPDPQPIGEPP |
| (AAS99286)) | AAPSSVGSGTMAAGGGAPMADNNEGADGVGSSSGNWHCDSTWLGDRVITTSTRTWALPTYNN |
| | HLYKQISNGTSGGSTNDNTYFGYSTPWGYLDFNRFHCHFSPRDWQRLINNNWGFRPKRLSFKLFN |
| | IQVKEVTQNEGTKTIANNLASTIQVFTDSEYQPPYVLGSAHQGCLPPFPADVFMIPQYGYLTLNNGS |
| | QAVGRSSFYCLEYFPSQMLRTGNNFSFSYTFEDVPFHSSYAHSQSLDRLMNPLIDQYLYYLSRTQST |
| | GGTAGTQQLLFSRAGPSNMSAQARNWLPGPCYRQQRVSTTLSQNNNSNFAWTGATKYHLNGR |
| | DSLVNPGVAMATNKDDEDRFFPSSGILMFGKQGAGKDNVDYSNVMLTSEEEIKTTNPVATEQYG |
| | VVADNLQQQNTAPTVGAVNSQGALPGMVWQNRDVYLQGPIWAKIPHTDGNFHPSPLMGGFG |
| | LKHPPPQILIKNTPVPADPPTAFNQAKLNSFIAQYSTGQVSVEIEWELQKENSKRWNPEIQYTSNYY |
| | KSTNADFAVNTEGVYSEPRPIGTRYLTRNL |
| SEQ ID | MAADGYLPDWLEDNLSEGIREWWDLKPGAPKPKANQQKQDDGRGLVLPGYKYLGPFNGLDKGE |
| NO: 91 | PVNAADAAALEHDKAYDQQLKAGDNPYLRYNHADAEFQERLQEDTSFGGNLGRAVFQAKKRVLE |
| (AAVhu.41 | PLGPVEEAAKTAPGKKRPVEPPPQRSPDSSTGIGKKGQQPAKKRLNFGQTGDSESVPDPQPIGEPP |
| (AAS99289)) | AGPSGLGSGTMAAGGGAPMADNNEGADGVGSSSGNWHCDSTWLGDRVITTSTRTWALPTYN |
| | NHLYKQISNGTSGGSTNDNTYFGYSTPWGYFDFNRFHCHFSPRDWQRLINNNWGFRPKRLSFKLF |
| | NIQVKEVTQNEGTKTVANNLTSTIQVFTDSEYQLPYVLGSAHQGCLPPFPADVFMIPQYGYLTLNN |
| | GSQAVGRSSFYCLEYFPSQMLRTGNNFEFSYTFEDVPFHSSYAHSQSLDRLMNPLIDQYLYYLSRTQ |
| | STGGTQGTQQLLFSQAGPANMSAQAKNWLPGPCYRQQRVSTTLSQNNNSNFAWTGATKYHLN |
| | GRDSLVNPGVAMATHKDDEERFFPSSGVLMFGKQGAGRDNVDYSSVMLTSEEEIKTTNPVATEQ |
| | YGVVADNLQQTNTGPIVGNVNSQGALPGMVWQNRDVYLQGPIWAKIPHTDGNFHPSPLMGGF |
| | GLKHPPPQILIKNTPVPADPPTTFSQAKLASFITQYSTGQVSVEIEWELQKENSKRWNPEIQYTSNYY |
| | KSTNVDFAVNTEGTYSEPRPIGTRYLTRNL |
| SEQ ID | MAADGYLPDWLEDNLSEGIREWWDLKPGAPKPKANQQKQDDGRGLVLPGYKYLGPFNGLDKGE |
| NO: 92 | PVNAADAAALEHDKAYDQQLKAGDNPYLRYNHADAEFQERLQEDTSFGGNLGRAVFQAKKRVLE |
| (AAVhu.42 | PLGLVEEAAKTAPGKKRPVEPSPQRSPDSSTGIGKKGQQPAKKRLNFGQTGDSESVPDPQPIGEPP |
| (AAS99290)) | AGPSGLGSGTMAAGGGAPMADNNEGADGVGSSSGNWHCDSTWLGDRVITTSTRTWALPTYN |
| | NHLYKQISNGTSGGSTNDNTYFGYSTPWGYFDFNRFHCHFSPRDWQRLINNNWGFRPKRLSFKLF |
| | NIQVKEVTQNEGTKTIANNLTSTIQVFTDSEYQLPYVLGSAHQGCLPPFPADVFMIPQYGYLTLNNG |
| | SQAVGRSSFYCLEYFPSQMLRTGNNFEFSYTFEDVPFHSSYAHSQSLDRLMNPLIDQYLYYLSRTQS |
| | TGGTQGTQQLLFSQAGPANMSAQAKNWLPGPCYRQQRVSTTLSQSNNSNFAWTGATKYHLNG |
| | RDSLVNPGVAMATHKDDEERFFPSSGVLMFGKQGAGRDNVDYSSVMLTSEEEIKTTNPVATEQY |
| | GVVADNLQQTNTGPIVGNVNSQGALPGMVWQNRDVYLQGPIWAKIPHTDGNFHPSPLMGGLG |
| | LKHPPPQILIKNTPVPADPPTTFSQAKLASFITQYSTGQVSVEIEWELQKENSKRWNPEIQYTSNYYK |
| | STNVDFAVNTEGTYSEPRPIGTRYLTRNL |
| SEQ ID | MAADGYLPDWLEDNLSEGIREWWDLKPGAPKPKANQQKQDDGRGLVLPGYKYLGPFNGLDKGE |
| NO: 93 | PVNAADAAALEHDKAYDQQLKAGDNPYPRYNHADAEFQERLQEDTPFGGNLGRAVFQAKKRVLE |
| (AAVhu.43 | PLGLVEEAAKTAPGKKRPVEPSPQRSPDSSTGIGKKGQQPAKKRLNFGQTGDSESVPDPQPIGEPP |
| (AAS99291)) | AGPSGLGSGTMAAGGGAPMADNNEGADGVGNASGNWHCDSTWLGDRVITTSTRTWALPTYN |
| | NHLYKQISSASTGASNDNHYFGYSTPWGYFDFNRFHCHFSPRDWQRLINNNWGFRPKRLNFKLF |
| | NIQVKEVTTNDGVTTIANNLTSTVQVFSDSEYQLPYVLGSAHQGCLPPFPADVFMIPQYGYLTLNN |
| | GSQAVGRSSFYCLEYFPSQMLRTGNNFTFSYTFEEVPLHSSYAHSQSLDRLMNPLIVQYLYYLNRTQ |
| | NQSGSAQNKDLLFSRGSPAGMSVQPKNWLPGPCYRQQRVSKTKTDNNNSNFTWTGASKYNLN |
| | GRESIINPGTAMASHKDDEDKFFPMSGVMIFGKESAGASNTALDNVMITDEEEIKATNPVATERFG |
| | TVAVNFQSSSTDPATGDVHAMGALPGMVWQDRDVYLQGPIWAKIPHTDGHFHPSPLMGGFGL |
| | KNPPPQILIKNTPVPANPPAEFSATKFASFITQYSTGQVSVEIEWELQKENSKRWNPEVQYTSNYAK |
| | SASVDFTVDNNGLYTEPRPIGTRYLTRPL |
| SEQ ID | MAADGYLPDWLEDTLSEGIRQWWKLRPGPPPPKPAERHKDDSRGLVLPGYKYLGPFNGLDKGEP |
| NO: 94 | VNEADAAALEHDKAYDRQLDSGDNPYLKYNHADAEFQERLKEDTSFGGNLGRAVFQAKKRVLEPL |
| (AAVhu.44 | GLVEEGAETAPGKKRPVEQSPQGPDSSSGIGKTGQQPAKKRLNFGQTGDSESVPDPQPLGEPPAT |
| (AAS99292)) | PAAVGPTTMASGGGAPMADNNEGADGVGNASGNWHCDSTWLGDRVITTSTRTWALPTYNNH |
| | LYKQISSASTGASNDNHYFGYSTPWGYFDFNRFHCHFSPRDWQRLINNNWGFRPKRLNFKLFNIQ |
| | VKEVTTNDGVTTIANNLTSTVQVFSDSEYQLPYVLGSAHQGCLPPFPADVFMIPQYGYLTLNNGSQ |
| | AVGRSSFYCLEYFPSQMLRTGNNFTFSYTFEEVPFHSSYAHSQSLDRLMNPLIDQYLYYPNRTQNQS |
| | GSAQNKDLLFSRGSPAGMSVQPKNWLPGPCYRQQRVSKTKTDNNNSNFTWTGASKYNLNGRES |
| | IINPGTAMASHKDDEDKFFPMSGVMIFGKESAGASNTALDNVMITDEEEIKATNPVATERFGTVA |
| | VNFQSSSTDPATGDVHAMGALPGMVWQGRDVYLQGPIWAKIPHTDGHFHPSPLMGGFGLKNP |
| | PPQILIKNTPVPANPPAEFSATKFASFITQYSTGQVSVEIEWELQKENSKRWNPEVQYTSNYAKSAN |
| | VDFTVDNNGLYTEPRPIGTRYLTRPL |
| SEQ ID | MAADGYLPDWLEDTLSEGIRQWWKLKPGPPPPKPAERHRDDSRGLVLPGYKYLGPFNGLDKGEP |
| NO: 95 | VNEADAAALEHDKAYDRQLDSGDNPYLKYNHADAEFQERLKEDTSFGGNLGRAVFQAKKRVLEPL |
| (AAVhu.45 | GLVEEPVKTAPGKKRPVEHSPVEPDSSSGTGKAGQQPARKRLNFGQTGDADSVPDPQPLGQPPA |
| (AAS99293)) | APSGLGTNTMATGSGAPMADNNEGADGVGNSSGNWHCDSTWMGDRVITTSTRTWALPTYNN |
| | HLYKQISSQSGASNDNHYFGYSTPWGYFDFNRFHCHFSPRDWQRLINNNWGFRPKRLNFKLFNIQ |
| | VKEVTQNDGTTTIANNLTSTVQVFTDSGYQLPYVLGSAHQGCLPPFPADVFMVPQYGYPTLNNGS |
| | QAVGRSSFYCLEYFPSQMLRTGNNFTFSYTFEDVPFHSSYAHSQSLDRLMNPLIDQYLYYLSTTNTP |
| | SGTTTQSRLQFSQAGASDIRDQSRNWLPGPCYRQQRVSKTSADNNNSEYSWTGATKYHLNGRDS |
| | LVNPGPAVASHKDDEEKFFPQSGVLIFGKQGSEKTNVDIEKVMITDEEEIRTTNPVATEQYGSVSTN |
| | LQRGNRQAATADVNTQGVLPGMVWQDRDVYLQGPIWAKIPHTDGHFHPSPLMGGFGLKHPPP |
| | QILIKNTPVPANPSTTFSAAKFASFITQYSTGQVSVEIEWELQKENSKRWNPEIQYTSNYNKSVNVD |
| | FTVDTNGVYSEPRPIGTRYLTRNL |
| SEQ ID | MAADGYLPDWLEDTLSEGIRQWWKLKPGPPPPKPAERHKDDSRGLVLPGYKYLGPFNGLDKGEP |
| NO: 96 | VNEADAAALEHDKAYDRQLDSGDNPYLKYNHADAEFQERLKEDTSFGGNLGRAVFQAKKRVLEPL |
| (AAVhu.46 | GLVEEGAKTAPGKKRPVEQSPQEPDSPSGIGKTGQQPAKKRLNFGQTGDSESVPDPQPLGEPPAT |
| (AAS99294)) | PAAVGPTTMASGGGAPMADNNEGADGVGNASGNWHCDSTWLGDRVITTSTRTWALPTYNNH |
| | LYKQISSASTGASNDNHYFGYSTPWGYFDFNRFHCHFSPRDWQRLINNNWGFRPKRLNFKLFNIQ |
| | VKEVTTNDGVTTIANNLTSTVQVFSDSEYQLPYVLGSAHQGRLPPFPADVFMIPQYGYLTLNNGSQ |
| | AVGRSSSYCLEYFPSQMLRTGNNFTFSYTFEEVPLHSSCAHSQSLDRLMNPLIDQYLYYLNRTQNQS |
| | GSAQNRDLLFSRGSPAGMSVQPKNWLPGPCYRQQRVSKTKTDNNNSNFTWTGASKYNLNGRES |
| | IINPGTAMASHKDDEDKFFPMSGVMIFGKESAGASNTALDNVMITDEEEIKATNPVATERFGTVÅ |
| | VNFQSSSTDPATGDVHAMGALPGMVWQDRDVYLQGPIWAKIPHTDGHFHPSPLMGGFGLKNP |
| | PPQILIKNTPVPANPPAEFSATKFASFITQYSAGQVSVEIEWELQKENSKRWNPEVQYTSNYAKSAN |
| | VDFTVDNNGLYTEPRPIGTRYLTRPL |
| SEQ ID | MAADGYLPDWLEDTLSEGIRQWWKLKPGPPPPKPAERHRDDSRGLVLPGYKYLGPFNGLDKGEP |
| NO: 97 | VNEADAAALEHDKAYDRQLDSGDNPYLKYNHADAEFQERLKEDTSFGGNLGRAVFQAKKRVLEPL |
| (AAVhu.47 | GLVGEPVKTAPGKKRPVEHSPVEPDSSSGTGKAGQQPARKRLNFGQTGDADSVPDPQPLGQPPA |
| (AAS99295)) | APSGLGTNTMATGSGAPMADNNEGADGVGNSSGNWHCDSTWMGDRVITTSTRTWALPTYNN |
| | HLYKQISSQSGASNDSHYFGYSTPWGYFDFNRFHCHFSPRDWQRLINNNWGFRPKRLNFKLFNIQ |
| | VKEVTQNDGTTTIANNLTSTVQVFTDSEYQLPYVLGSAHQGCLPPFPADVFMVPQYGYLTLNNGS |
| | QAVGRSSFYCLEYFPSQMLRTGNNFTFSYTFEDVPFHSSYAHSQSLDRLMNPLIDQYLYYLSTTNTP |
| | SGTTTQSRLQFSQAGASDIRDQSRNWLPGPCYRQQRVSKTSADNNNSEYSWTGATKYHLNGRDS |
| | LVNPGPAMASHKDNEEKFFPQSGVLIFGKQGSEKTNVDIEKVMITDEEEIRTTNPVATEQYGSVST |
| | NLQRGNRQAATADVNTQGVLPGMVWQDRDVYLQGPIWAKIPHTDGHFHPSPLMGGFGLKHPP |
| | PQILIKNTPVPANPSTTFSAAKFASFITQYSTGQVSVEIEWELQKENSKRWNPEIQYTSNYNKSVNV |
| | DFTVDTNGVYSEPRPIGTRYLTRNL |
| SEQ ID | MAADGYLPDWLEDNLSEGIREWWDLKPGAPKPKANQQKQDDGRGLVLPGYKYLGPFNGLDKGE |
| NO: 98 | PVNAADAAALEHDKAYDQQLKAGDNPYLRYNHADAEFQERLQEDTSFGGNLGRAVFQAKKRVLE |
| (AAVhu.48 | PLGLVEEGAKTAPGKKRPVEQSPQEPDSSSGIGKTGQQPAKKRLNFGQTGDSESVPDPQPLGEPPA |
| (AAS99296)) | TPAAVGPTTMASGGGAPMADNNEGADGVGNASGNWHCDSTWLGDRVITTSTRTWALPTYNN |
| | HLYKQISSTSTGASNDNHYFGYGTPWGYFDFNRFHCHFSPRDWQRLINNNWGFRPKRLNFKLFNI |
| | QVEEVTTNDGVTTIANNLTSTVQVFSDSEYQLPYVLGSAHQGCLPPFPADVFMIPQYGYLTLNNGS |
| | QAVGRSSFYCLEYFPSQMLRTGNNFTFSYTFEEVPFHSSYAHSQSLDRLMNPLIDQYLYYLNRTQN |
| | QSGSAQNKDLLFSRGSPAGMSVQPKNWLPGPCYRQQRVSKTKTDNNNSNFTWTGASKYNLNGR |
| | ESIINPGTAVASHKDDEDKFFPMSGVMIFGKESAGASSTALDNVMITDEEEIKATNPVATERFGTVA |
| | VNFQSSSTDPATGDVHAMGALPGMVWQDRDVYLQGPIWAKIPHTDGHFHPSPLMGGFGLKNP |
| | PPQILIKNTPVPANPPAEFSATKFASFITQYSTGQVSVEIEWELQKENSKRWNPEVQYTSNYAKSAN |
| | VDFTVDNNGLYTEPRPIGTRYLTRPL |
| SEQ ID | MAADGYLPDWLEDTLSEGIRQWWKLKPGPPPPKPAERHKDDSRGLVLPGYKYLGPFNGLDKGEP |
| NO: 99 | VNEADAAALEHDKAYDRQLDSGDNPYLKYNHADAEFQERLKEDTSFGGNLGRAVFQAKKRVLEPL |
| (AAVhu.51 | GLVGEPVKTAPGKKRPVEHSPVEPDSSSGTGKAGQQPARKRLNFGQTGDADSVPDPQPLGQPPA |
| (AAS99298)) | ÅPSGLGTNTMATGSGAPMADNNEGADGVGNSSGNWHCDSTWMGDRVITTSTRTWALPTYNN |
| | HLYKQISSQSGASNDNHYFGYSTPWGYFDFNRFHCHFSPRDWQRLINNNWGFRPKRLNFKLFNIQ |
| | VKEVTQNDGTTTIANNLTSTVQVFTDSEYQLPYVLGSAHQGCLPPFPADVFMVPQYGYLTLNNGS |
| | QAVGRSSFYCLEYFPSQMLRTGNNFTFSYTFEDVPFHSGYAHSQSLDRLMNPLIDQYLYYLSTTNTP |
| | SGTTTQSRLQFSQAGASDIRDQSRNWLPGPCYRQQRVSKTSADNNNSEYSWTGATKYHLNGRDS |
| | LVNPGPAMASHKDNEEKFFPQSGVLIFGKQGSEKTNVDIEKVMITDEEEIRTTNPVATEQYGSVST |
| | NLQRGNRQAATADVNTQGVLPGMVWQDRDVYLQGPIWAKIPHTDGHFHPSPLMGGFGLKHPP |
| | PQILIKNTPVPANPSTTFSAAKFASFITQYSTGQVSVEIEWELQKENSKRWNPEIQYTSNYNKSVNV |
| | DFTVDTNGVYSEPRPIGTRYLTRNL |
| SEQ ID | MAADGYLPDWLEDTLSEGIRQWWKLKPGPPPPKPAERHKDDSRGLVLPGYKYLGPFNGLDKGEP |
| NO: 100 | VNEADAAALEHDKAYDRQLDSGDNPYLKYNHADAEFQERLKEDTSFGGNLGRAVFQAKKRVLEPL |
| (AAVhu.52 | GLVGEPVKTAPGKKRPVEHSPVEPDSSSGTGKAGQQPARKRLNFGQTGDADSVPDPQPLGQPPA |
| (AAS99299)) | APSGLGTNTMATGSGAPMADNNEGADGVGNSSGNRHCDSTWMGDRVITTSTRTWALPTYNN |
| | HLYRQISSQSGASNDNHYFGYSTPWGYFDFNRFHCHFSPRDWQRLINNNWGFRPKRLNFKLFNIQ |
| | VKEVTQNDGTTTIANNLTSTVQVFTDSEYQLPYVLGSAHQGCLPPFPADVFMVPQYGYLTLSNGS |
| | QAVGRSSFYCPEYFPSQMLRTGNNFTFSYTFEDVPFHSSYAHSQSLDRLMNPLIDQYLYYLSTTNTP |
| | SGTTTQSRLQFSQAGASDIRDQSRNWLPGPCYRQQRVSKTSADNNNSEYSWTGATKYHLNGRDS |
| | LVNPGPAMASHKDNEEKFFPQSGVLIFGKQGSEKTNVDIEKVMITDEEEIRTTNPVATEQYGSVST |
| | NLQRGNRQAATADVNTQGVLPGMVWQDRDVYLQGPIWAKIPHTDGHFHPSPLMGGFGPKHP |
| | PPQILIKNTPVPANPSTTFSAAKFASFITQYSTGQVSVEIEWELQKENSKRWNPEIQYTSNYNKSVNV |
| | DFTVDTNGVYSEPRPIGTRYLTRNL |
| SEQ ID | MAADGYLPDWLEDTLSEGIRQWWKLKPGPPPPKPAERHKDDSRGLVLPGYKYLGPFNGLDKGEP |
| NO: 101 | VNEADAAALEHDKAYDRQLDSGDNPYLKYNHADAEFQERLKEDTSFGGNLGRAVFQAKKRVLEPL |
| (AAVhu.53 | GLVEEPVKTAPGKKRPVEHSPAEPDSSSGTGKAGQQPARKRLNFGQTGDADSVPDPQPLRQPPA |
| (AAS99300)) | APTSLGSTTMATGSGAPMADNNEGADGVGNSSGNWHCDSQWLGDRVITTSTRTWALPTYNNH |
| | LYKQISSQSGASNDNHYFGYSTPWGYFDFNRFHCHFSPRDWQRLINNNWGFRPKRLNFKLFNIQV |
| | KEVTQNDGTTTIANNLTSTVQVFTDSEYQLPYVLGSAHQGCLPPFPADVFMVPQYGYLTLNNGSQ |
| | AVGRSSFYCLEYFPSQMLRTGNNFQFSYTFEDVPFHSSYAHSQSLDRLMNPLIDQYLYYLNRTQTAS |
| | GTQQSRLLFSQAGPTSMSLQAKNWLPGPCYRQQRLSKQANDNNNSNFPWTGATKYYLNGRDSL |
| | VNPGPAMASHKDDEEKFFPMHGTLIFGKEGTNATNAELENVMITDEEEIRTTNPVATEQYGYVSN |
| | NLQNSNTAASTETVNHQGALPGMVWQDRDVYLQGPIWAKIPHTDGHFHPSPLMGGFGLKHPP |
| | PQIMIKNTPVPANPPTNFSSAKFASFITQYSTGQVSVEIEWELQKENSKRWNPEIQYTSNYNKSVNV |
| | DFTVDTNGVYSEPRPIGTRYLTRNL |
| SEQ ID | MAADGYLPDWLEDTLSEGIRQWWKLKPGPPPPKPAERHKDDSRGLVLPGYKYLGPFNGLDKGEP |
| NO: 102 | VNEADAAALEHDKAYDRQLDSGDNPYLKYNHADAEFQERLKEDTSFGGNLGRAVFQAKKRVLEPL |
| (AAVhu.54 | GLVEEPVKTAPGKKRPVEHSPAEPDSSSGTGKAGQQPARKRLNFGQTGDADSVPDPQPLGQPPÅ |
| (AAS99301)) | APTSLGSTTMATGSGAPMADNNEGADGVGNSSGNWHCDSQWLGDRVITTSTRTWALPTYNNH |
| | LYKQISSQSGASNDNHYFGYSTPWGYFDFNRFHCRFSPRDWQRLINNNWGFRPKRLNFKLFNIQV |
| | KEVTQNDGTTTIANNLTSTVQVFTDSEYQLPYVLGSAHQGCLPPFPADVFMVPQYGYLTLNNGSQ |
| | AVGRSSFYCLEYFPSQMLRTGNNFQFSYTFEDVPFHSSYAHSQGLDRLMNPLIDQYLYYLNRTQTA |
| | SGTQQSRLLFSQAGPTSMSLQAKNWLPGPCYRQQRLSKQANDNNNSNFPWTGATKYHLNGGDS |
| | LVNPGPAMASHKDDEEKFFPMHGTLIFGKEGTNATNAELENVMITDEEEIRTTNPVATEQYGYVS |
| | NNLQNSNTAASTETVNHQGALPGMVWQDRDVYLRGPIWAKIPHADGHFHPSPLMGGFGLKHP |
| | PPQIMIKNTPVPANPPTNFSSAKFASFITQYSTGQVSVEIEWELQKENSKRWNPEIQYTSNYNKSVN |
| | VDFTVDTNGVYSEPRPIGTRYLTRNL |
| SEQ ID | MAADGYLPDWLEDTLSEGIRQWWKLKPGPPPPKPAERHKDDSRGLVLPGYKYLGPFNGLDKGEP |
| NO: 103 | VNEADAAALEHDKAYDRQLDSGDNPYLKYNHADAEFQERLKEDTSFGGNLGRAVFQAKKRVLEPL |
| (AAVhu.55 | GLVEEPVKTAPGKKRPVEHSPAEPDSSSGTGKAGQQPARKRLNFGQTGDADSVPDPQPLGQPPA |
| (AAS99302)) | APTSLGSTTMATGSGAPMADNNEGADGVGNSSGNWHCDSQWLGDRVITTSTRTWALPTYNNH |
| | LYKQISSQSGASNDNHYFGYSTPWGYFDFNRFHCHFSPRDWQRLINNNWGFRPKRLNFKLFNIQV |
| | KEVTQNDGTTTIANNLTSTVQVFTDSEYQLPYVLGSAHQGCLPPFPADVFMVPQYGYLTLNNGSQ |
| | AVGRSSFYCLECFPSQMLRTGNNFQFSYTFEDVPFHSSYAHSQSLDRLMNPLIDQYLYYLNRTQTAS |
| | GTQQSRLLFSQAGPTSMSLQAKNWLPGPCYRQQRLSKQANDNNNSNFPWTGATKYHLNGRDSL |
| | VNPGPAMASHKDDEEKFFPMHGTLIFGKEGTNATNAELENVMITDEEEIRTTNPVATEQYGYVSN |
| | NLQNSNTAASTETVNHQGALPGMVWQDRDVYLQGPIWAKIPHTDGHFHPSPLMGGFGLKHPP |
| | PQIMIKNTPVPANPPTNFSSAKFASFITQYSTGQVSVEIEWELQKENSKRWNPEIQYTSNYNKSVNV |
| | DFTVDTNGVYSEPRPIGTRYLTRNL |
| SEQ ID | MAADGYLPDWLEDTLSEGIRQWWKLKPGPPPPKPAERHKDDSRGLVLPGYKYLGPFNGLDKGEP |
| NO: 104 | VNEADAAALEHDKAYDRQLDSGDNPYLKYNHADAEFQERLKEDTSFGGNLGRAVFQAKKRVLEPL |
| (AAVhu.56 | GLVEEPVKTAPGKKRPVEHSPVEPDSSSGTGKAGNQPARKRLNFGQTGDADSVPDPQPLGQPPAS |
| (AAS99303)) | PSGLGTNTMATGSGAPMADNNEGADGVGNSSGNWHCDSTWMGDRVVTTSTRTWALPTYNN |
| | HLYKQISSQSGASNDNHYFGYSTPWGYFDFNRFHCHFSPRDWQRLINNNWGFRPKRLNFKLFNIQ |
| | VKEVTQNDGTTTIANNLTSTVQVFTDLEYQLPYVLGSAHQGCLPPFPADVFMVPQYGYLTLNNGS |
| | QAVGRSSFYCLEYFPSQMLRTGNNFTFSYTFEDVPFHSSYAHSQSLDRLMNPLIDQYLYYLSRTNTP |
| | SGTTTQSRLQFSQAGASDIRDQSRNWLPGPCYRQQRVSKTAADNNNSEYSWTGATKYHLNGRDS |
| | LVNPGPAMASHKDDEEKFFPQSGVLIFGKQGSEKTNVDIEKVMITDEEEIRTTNPVATEQYGSVST |
| | NLQSGNTQAATSDVNTQGVLPGMVWQDRDVYLQGPIWAKIPHTDGHFHPSPLMGGFGLKHPP |
| | PQILIKNTPVPANPSTTFSAAKFASFITQYSTGQVSVEIEWELQKENSKRWNPEIQYTSNYNKSVNV |
| | DFTVDTNGVYSEPRPIGTRYLTRNL |
| SEQ ID | MAADGYLPDWLEDTLSEGIRQWWKLKPGPPPKPAERHKDDSRGLVLPGYKYLGPFNGLDKGEPV |
| NO: 105 | NEADAAALEHDKAYDRQLDSGDNPYLKYNHADAEFQERLKEDTSFGGNLGRAVFQAKKRVLEPLG |
| (AAVhu.57 | LVEEPVKTAPGKKRPVEHSPVEPDSSSGTGKAGNQPARKRLNFGQTGDADSVPDPQPLGQPPAAP |
| (AAS99304)) | SGLGTNTMATGSGAPMADNNEGADGVGNSSGDWHCDSTWMGDRVITTSTRTWALPTYNNHL |
| | YKQISSQSGASNDNHYFGYSTPWGYFDFNRFHCHFSPRDWQRLINNNWGFRPKRLNLKLFNIQVK |
| | EVTQNDGTTTIANNLTSTVQVFTDLEYQLPYVLGSAHQGCLPPFPADVFMVPQYGYLTLNNGSQA |
| | VGRSSFYCLEYFPSQMLRTGNNFTFSYTFEDVPFHSSYAHSQSLDRLMNPLIDQYLYYLSRTNTPSGT |
| | TTQSRLQFSQAGASDIRDQSRNWLPGPCYRQQRVSKTAADNNNGEYSWTGATKYHLNGRDSLV |
| | NPGPAMASHKDDEEKFFPQSGVLIFGKQGSEKTNVDIEKVMITDEEEIRTTNPVATEQYGSVSTNL |
| | QSGNTRAATSDVNTQGVLPGMVWQDRDVYLQGPIWAKIPHTDGHFHPSPLMGGFGLKHPPPQI |
| | LIKNTPVPANPSTTFSAAKFASFITQYSTGQVSVEIEWELQKENSKRWNPEIQYTSNYNKSVNVDFT |
| | VDTNGVYSEPRPIGTRYLTRNL |
| SEQ ID | MAADGYLPDWLEDTLSEGIRQWWKLKPGPPPPKPAERHKDDSRGLVLPGYKYLGPFNGLDKGEP |
| NO: 106 | VNEADAAALEHDKAYDRQLDSGDNPYLKYNHADAEFQERLKEDTSFGGNLGRAVFQAKKRVLEPL |
| (AAVhu.60 | GLVEEPVKTAPGKKRPVEHSPVEPDSSSGTGKAGQQPARKRLNFGQTGDADSVPDPQPLGQPPA |
| (AAS99307)) | APSGLGSTTMATGSGAPMADNNEGADGVGNSSGNWHCDSQWLGDRVITTSTRTWALPTYNN |
| | HLYKQISSQSGASNDNHYFGYSTPWGYFDFNRFHCHFSPRDWQRLINNNWGFRPKRLNFKLFNIQ |
| | VKEVTQNDGTTTIANNLTSTVQVFTDSEYQLPYVLGSAHQGCLPPFPADVFMVPQYGYLTLNNGS |
| | QAVGRSSFYCLEYFPSQMLRTGNNFQFSYTFEDVPFHSSYAHSQSLDRLMNPLVDQYLYYLNKTQT |
| | NSGTLQQSRLLFSQAGPTNMSLQAKNWLPGPCYRQQRLSKQANDNNNSNFPWTAATKYHLNGR |
| | DSLVNPGPAMASHKDDEEKFFPMHGTLIFGKQGTNANDADLENVMITDEEEIRTTNPVATEQYGT |
| | VSNNLQNSNTGPTTGTVNHQGALPGMVWQDRDVYLQGPIWAKIPHTDGHFHPSPLMGGFGLK |
| | HPPPQIMIKNTPVPANPPTNFSSAKFASFITQYSTGQVSVEIEWELQKENSKRWNPEIQYTSNYNKS |
| | VNVDFTVDTNGVYSEPRPIGTRYLTRNL |
| SEQ ID | MAADGYLPDWLEDTLSEGIRQWWKLKPGPPPPKPAERHKDDSRGLVLPGYKYLGPFNGLDKGEP |
| NO: 107 | VNEADAAALEHDKAYDRQLDSGDNPYLKYNHADAEFQERLKEDTSFGGNLGRAVFQAKKRVLEPL |
| (AAVhu.61 | GLVEEPVKTAPGKKRPVEHPPVEPDSSSGTGKAGQQPARKRLNFGQTGDADSVPDPQPLGQPPA |
| (AAS99308)) | APSGLGSTTMATGSGAPMADNNEGADGVGNSSGNWHCDSQWLGDRVITTSTRTWALPTYNN |
| | HLYKQISSQSGASNDNHYFGYSTPWGYFDFNRFHCHFSPRDWQRLINNNWGFRPKRLNFKLFNIQ |
| | VKEVTQNDGTTTIANNLTSTVQVFTDSEYQLPYVLGSAHQGCLPPFPADVFMVPQYGYLTLNNGS |
| | QAVGRSSFYCLEYFPSQMLRTGNNFQFSYTFEDVPFHSSYAHSQSLDRLMNPLIDQYLYYLNKTQT |
| | NSGTLQQSRLLFSQAGPTNMSLQAKNRLPGPCYRQQRLSKOANDNNNSNFPWTAATKYHLNGR |
| | DSLVNPGPAMASHKDDEEKFFPMHGTLIFGKQGTNANDADLENVMITDEEEIRTTNPVATEQYGT |
| | VSNNLQNSNTGPTTGTVNHQGALPGMVWQDRDVYLQGPIWAKIPHTDGHFHPSPLVGGFGLK |
| | HPPPQIMIKNTPVPANPPTNFSSAKFASFITQYSTGQVSVEIEWELQKENSKRWNPEIQYTSNYNKS |
| | VNVDFTVDTNGVYSEPRPIGTRYLTRNL |
| SEQ ID | MAADGYLPDWLEDTLSEGIRQWWKLKPGPPPPKPAERHKDDSRGLVLPGYKYLGPFNGLDKGEP |
| NO: 108 | VNEADAAALEHDKAYDRQLDSGDNPYPKYNHADAEFQERLKEDTSFGGNLGRAVFQAKKRVLEPL |
| (AAVhu.63 | GLVEEPVKTAPGKKRPVEHSPAEPDSSSGTGKAGQQPARKRLNFGQTGDADSVPDPQPLGQPPA |
| (AAS99309)) | APSGLGTNTMATGSGAPMADNNEGADGVGNSSGNWHCDSTWMGDRVITTSTRTWALPTYNN |
| | HLYKQISSQSGASNDNHYFGYSTPWGYFDFNRFHCHFSPRDWQRLINNNWGFRPKRLNFKLFNIQ |
| | VKEVTQNDGTTTIANNLTSTVQVFTDSEYQLPYVLGSAHQGCLPPFPADVFMVPQYGYLTLNNGS |
| | QAVGRSSFYCLEYFPSQMLRTGNNFTFSYTFEDVPFHSSYAHSQSLDRLMNPLIDQYLYYLSRTNTP |
| | SGTTTQSRLQFSQAGASDIRDQSRNWLPGPCYRQQRVSKTSADNNNSEYSWTGATKYHLNGRDS |
| | LVNPGPAMASHKDDEEKFFPQSGVLIFGKQDSGKTNVDIEKVMITDEEEIRTTNPVATEQYGSVST |
| | NLQSGNTQAATSDVNTQGVLPGMVWQDRDVYLQGPIWAKIPHTDGHFHPSPLMGGFGLKHPP |
| | PQILIKNTPVPANPSTTFSAAKFASFITQYSTGQVSVEIEWELQKENSKRWNPEIQYTSNYNKSVNV |
| | DFTVDTNGVYSEPRPIGTRYLTRNL |
| SEQ ID | MAADGYLPDWLEDNLSEGIREWWDLKPGAPKPKANQQKQDDGRGLVLPGYKYLGPFNGLDKGE |
| NO: 109 | PVNAADAAALEHDKAYDQQLKAGDNPYLRYNHADAEFQERLQEDTSFGGNLGRAVFQAKKRVLE |
| (AAVhu.66 | PLGLVEEAAKTAPGKKRPVEPSPQRSPDSSAGIGKKGQQPAKKRLNFGQTGDSESVPDPQPIGEPP |
| (AAS99311)) | AGPSGLGSGTMAAGGGAPMADNNEGADGVGSSSGNWHCDSTWLGDRVITTSTRTWALPTYN |
| | NHLYKQISNGTSGGSTNDNTYFGYSTPWGYFDFNRFHCHFSPRDWQRLINNNWGFRPKRLSFKLF |
| | NIQVKEVTQNEGTETIANNLTSTIQVFTDSEYQLPYVLGSAHQGCLPPFPADVFMIPQYGYLTLNNG |
| | SQAVGRSSFYCLEYFPSQMLRTGNNFEFSYTFEDVPFHSSCAHSQSSDRLMNPLIDQYLYYLSRTRS |
| | TGGTQGTQQLLFSQAGPANMSAQAKNWLPGPCYRQQRVSTTLSQNNNSNFAWTGATKYHLNG |
| | RDSLVNPGVAMATHKDDEERFFPSSGVLMFGKQGAGRDNVDYSSVMLTSEEEIKTTNPVATEQY |
| | GVVADNLQQTNTGPIVGNVNSQGALPGMVWQNRDVYLQGPIWAKIPHTDGNFHPSPLMGGFG |
| | LKHPPPQILIKNTPVPADPPTTFSQAKLASFITQYSTGQVSVEIEWELQKENSKRWNPEIQYTSNYYK |
| | STNVDFAVNTEGTYSEPRPIGTRYLTRNL |
| SEQ ID | MAADGYLPDWLEDNLSEGIREWWDLKPGAPKPKANQQKQDDGRGLVLLGYKYLGPFNGLDKGE |
| NO: 110 | PVNAADAAALEHDKAYDQQLKAGDNPYLRYNHADAEFQERLQEDTSFGGNLGRAVFQAKKRVLE |
| (AAVhu.67 | PLGLVEEAAKTAPGKKRPVEPSPQRSPDSSTGIGKKGQQPAKKRLNFGQTGDSESVPDPQPIGEPP |
| (AAS99312)) | AGPSGLGSGTMAAGGGAPMADNNEGADGVGSSSGNWHCDSTWLGDRVITTSTRTWALPTYN |
| | NHLYKQISNGTSGGSTNDNTYFGYSTPWGYFDFNRFHCHFSPRDWQRLINNNWGFRPKRLSFKLF |
| | NIQVKEVTQNEGTKTIANNLTSTIQVFTDSEYQLPYVLGSAHQGCLPPFPADVFMIPQYGYLTLNNG |
| | SQAVGRSSFYCLEYFPSQMLRTGNNFEFSYTFEDVPFHSGYAHSQSLDRLMNPLIDQYLYYLSRTQS |
| | TGGTQGTQQLLFSQAGPANMSAQAKNWLPGPCYRQQRVSTTLSQNNNSNFAWTGATKYHLNG |
| | RDSLVNPGVAMATHKDDEERFFPSSGVLMFGKQGAGRDNVDYSSVMLTSEEEIKTTNPVATEQY |
| | GVVADNLQQTNTGPIVGNVNSQGALPGMVWQNRDVYLQGPIWAKIPHTDGNFHPSPLMGGFG |
| | LKHPPPQILIKNTPVPADPPTTFSQAKLASFITQYSTGQVSVEIEWELQKENSKRWNPEIQYTSNYYK |
| | STNVDFAVNTEGTYSEPRPIGTRYLTRNL |
| SEQ ID | MAADGYLPDWLEDNLSEGIREWWDLKPGAPKPKANQQKQDDGRGLVLPGYKYLGPFNGLDKGE |
| NO: 111 | PVNAADAAALEHDKAYDQQLKAGDNPYLRYNHADAEFQERLQEDTSFGGNLGRAVFQAKKRVLE |
| (AAVrh.10 | PLGLVEEGAKTAPGKKRPVEPSPQRSPDSSTGIGKKGQQPAKKRLNFGQTGDSESVPDPQPIGEPP |
| (AAO88201)) | AGPSGLGSGTMAAGGGAPMADNNEGADGVGSSSGNWHCDSTWLGDRVITTSTRTWALPTYN |
| | NHLYKQISNGTSGGSTNDNTYFGYSTPWGYFDFNRFHCHFSPRDWQRLINNNWGFRPKRLNFKL |
| | FNIQVKEVTQNEGTKTIANNLTSTIQVFTDSEYQLPYVLGSAHQGCLPPFPADVFMIPQYGYLTLNN |
| | GSQAVGRSSFYCLEYFPSQMLRTGNNFEFSYQFEDVPFHSSYAHSQSLDRLMNPLIDQYLYYLSRTQ |
| | STGGTAGTQQLLFSQAGPNNMSAQAKNWLPGPCYRQQRVSTTLSQNNNSNFAWTGATKYHLN |
| | GRDSLVNPGVAMATHKDDEERFFPSSGVLMFGKQGAGKDNVDYSSVMLTSEEEIKTTNPVATEQ |
| | YGVVADNLQQQNAAPIVGAVNSQGALPGMVWQNRDVYLQGPIWAKIPHTDGNFHPSPLMGGF |
| | GLKHPPPQILIKNTPVPADPPTTFSQAKLASFITQYSTGQVSVEIEWELQKENSKRWNPEIQYTSNYY |
| | KSTNVDFAVNTDGTYSEPRPIGTRYLTRNL |
| SEQ ID | MAADGYLPDWLEDNLSEGIREWWDLKPGAPKPKANQQKQDDGRGLVLPGYKYLGPFNGLDKGE |
| NO: 112 | PVNEADAAALEHDKAYDKQLEQGDNPYLKYNHADAEFQERLQEDTSFGGNLGRAVFQAKKRVLE |
| (AAVrh.13 | PLGLVEEGAKTAPGKKRPIESPDSSTGIGKKGQQPAKKKLNFGQTGDSESVPDPQPLGEPPAAPSGL |
| (AAO88199)) | GSGTMAAGGGAPMADNNEGADGVGNASGNWHCDSTWLGDRVITTSTRTWALPTYNNHLYKQ |
| | ISSQSGATNDNHFFGYSTPWGYFDFNRFHCHFSPRDWQRLINNNWGFRPRKLRFKLFNIQVKEVT |
| | TNDGVTTIANNLTSTIQVFSDSEYQLPYVLGSAHQGCLPPFPADVFMIPQYGYLTLNNGSQSVGRSS |
| | FYCLEYFPSQMLRTGNNFEFSYTFEEVPFHSSYAHSQSLDRLMNPLIDQYLYYLARTQSTTGSTRELQ |
| | FHQAGPNTMAEQSKNWLPGPCYRQQRLSKNIDSNNNSNFAWTGATKYHLNGRNSLTNPGVAM |
| | ATNKDDEDQFFPINGVLVFGETGAANKTTLENVLMTSEEEIKTTNPVATEEYGVVSSNLQSSTAGP |
| | QTQTVNSQGALPGMVWQNRDVYLQGPIWAKIPHTDGNFHPSPLMGGFGLKHPPPQILIKNTPV |
| | PANPPEVFTPAKFASFITQYSTGQVSVEIEWELQKENSKRWNPEIQYTSNYAKSNNVEFAVNNEGV |
| | YTEPRPIGTRYLTRNL |
| SEQ ID | MAADGYLPDWLEDNLSEGIREWWDLKPGAPKPKANQQKQDDGRGLVLPGYKYLGPFNGLDKGE |
| NO: 113 | PVNEADAAALEHDKAYDKQLEQGDNPYLKYNHADAEFQERLQEDTSFGGNLGRAVFQAKKRVLE |
| (AAVrh.19 | PLGLVEEGAKTAPGKKRPVEPSPQRSPDSSTGIGKTGQQPAKKRLNFGQTGDSESVPDPQPIGEPP |
| (AAO88194)) | AGPSGLGSGTMAAGGGAPMADNNEGADGVGSSSGNWHCDSTWLGDRVITTSTRTWALPTYN |
| | NHLYKQISNGTSGGSTNDNTYFGYSTPWGYFDFNRFHCHFSPRDWQRLINNNWGFRPRKLRFKLF |
| | NIQVKEVTTDDGVTTIANNLTSTIQVFSDSEYQLPYVLGSAHQGCLPPFPADVFMIPQYGYLTLNNG |
| | SQSVGRSSFYCLEYFPSQMLRTGNNFEFSYTFEEVPFHSSYAHSQSLDRLMNPLIDQYLYYLARTQST |
| | TGSTRELQFHQAGPNTMAEQSKNWLPGPCYRQQRLSKNIDSNNNSNFAWTGATKYHLNGRNSL |
| | TNPGVAMATNKDDEDQFFPINGVLVFGKTGAANKTTLENVLMTSEEEIKTTNPVATEEYGVVSSNL |
| | QSSTAGPQTQTVNSQGALPGMVWQNRDVYLQGPIWAKIPHTDGNFHPSPLMDGFGLKHPPPQI |
| | LIKNTPVPANPPEVFTPAKFASFITQYSTGQVSVEIEWELQKENSKRWNPEIQYTSNYAKSNNVEFA |
| | VNNEGVYTEPRPIGTRYLTRNL |
| SEQ ID | MAADGYLPDWLEDNLSEGIREWWDLKPGAPKPKANQQKQDDGRGLVLPGYKYLGPFNGLDKGE |
| NO: 114 | PVNAADAAALEHDKAYDQQLKAGDNPYLRYNHADAEFQERLQEDTSFGGNLGRAVFQAKKRVLE |
| (AAVrh.22 | PLGLVEEGAKTAPGKKRPIESPDSSTGIGKKGQQPAKKKLNFGQTGDSESVPDPQPIGEPPAGPSGL |
| (AAO88192)) | GSGTMAAGGGAPMADNNEGADGVGNASGNWHCDSTWLGDRVITTSTRTWALPTYNNHLYKQ |
| | ISSQSGATNDNHFFGYSTPWGYFDFNRFHCHFSPRDWQRLINNNWGFRPRKLRFKLFNIQVKEVT |
| | TNDGVTTIANNLTSTIQVFSDSEYQLPYVLGSAHQGCLPPFPADVFMIPQYGYLTLNNGSQSVGRSS |
| | FYCLEYFPSQMLRTGNNFEFSYTFEEVPFHSSYAHSQSLDRLMNPLIDQYLYYLARTQSTTGSTRELQ |
| | FHQAGPNTMAEQSKNWLPGPCYRRQRLSKDIDSNNNSNFAWTGATKYHLNGRNSLTNPGVAM |
| | ATNKDDEDQFFPINGVLVFGKTGAANKTTLENVLMTSEEEIKTTNPVATEEYGVVSSNLQSSTAGP |
| | QTQTVNSQGALPGMVWQNRDVYLQGPIWAKIPHTDGNFHPSPLMGGFGLKHPPPQILIKNTPV |
| | PANPPEVFTPAKFASFITQYSTGQVSVEIEWELQKENSKRWNPEIQYTSNYAKSNNVEFAVNNEGV |
| | YTEPRPIGTRYLTRNL |
| SEQ ID | MAADGYLPDWLEDNLSEGIREWWDLKPGAPKPKANQQKQDDGRGLVLPGYKYLGPFNGLDKGE |
| NO: 115 | PVNEADAAALEHDKAYDKOLEQGDNPYLKYNHADAEFQERLQEDTSFGGNLGRAVFQAKKRVLE |
| (AAVrh.23 | PLGLVEEGAKTAPGKKRPVEPSPQRSPDSSTGIGKTGQQPAKKRLNFGQTGDSESVPDPQPIGEPP |
| (AAO88191)) | AGPSGLGSGTMAAGGGAPMADNNEGADGVGSSSGNWHCDSTWLGDRVITTSTRTWALPTYN |
| | NHLYKQISNGTSGGSTNDNTYFGYSTPWGYFDFNRFHCHFSPRDWQRLINNNWGFRPKRLNFKL |
| | FNIQVKEVTQNEGTKTIANNLTSTIQVFTDSEYQLPYVLGSAHQGCLPPFPADVFMIPQYGYLTLNN |
| | GSQAVGRSSFYCLEYFPSQMLRTGNNFEFSYQFEDVPFHSSYAHSQSLDRLTNPLIDQYLYYLARTQ |
| | STTGSTRGLQFHQAGPNTMAEQSKNWLPGPCYRQQRLSKNIDSNNNSNFAWTGATKYHLNGRN |
| | SLTNPGVAMATNKDDEDQFFPINGVLVFGKTGAANKTTLENVLMTSEEEIKTTNPVATEEYGVVSS |
| | NLQSSTAGPQTQTVNSQGALPGMVWQNRDVYLQGPIWAKIPHTDGNFHPSPLMGGFGLKHPP |
| | PQILIKYTSNYYKSTNVDFAVNTEGTYSEPRPIGTRYLTRNL |
| SEQ ID | MAADGYLPDWLEDNLSEGIREWWDLKPGAPKPKANQQKQDDGRGLVLPGYKYLGPFNGLDKGE |
| NO: 116 | PVNAADAAALEHDKAYDQQLKAGDNPYLRYNHADAEFQERLQEDTSFGGNLGRAVFQAKKRVLE |
| (AAVrh.24 | PLGLVEEGAKTAPGKKRPIESPDSSTGIGKKGQQPAKKKLNFGQTGDSESVPDPQPIGEPPAGPSGL |
| (AAO88190)) | GSGTMAAGGGAPMADNNEGADGVGSSSGNWHCDSTWLGDRVITTSTRTWALPTYNNHLYKQI |
| | SNGTSGGSTNDNTYFGYSTPWGYFDFNRFHCHFSPRDWQRLINNNWGFRPKRLNFKLFNIQVKE |
| | VTQNEGTKTIANNLTSTIQVFTDSEYQLPYVLGSAHQGCLPPFPADVFMIPQYGYLTLNNGSQAVG |
| | RSSFYCLEYFPSQMLRTGNNFEFSYQFEDVPFHSSYAHSQSLDRLMNPLIDQYLYYLSRTQSTGGTA |
| | GTQQLLFSQAGPNNMSAQAKNWLPGPCYRQQRVSTTVSQNNNSNFAWTGATKYHLNGRDSLV |
| | NPGVAMATHKGDEERFFPSSGVLMFGKQGAGKDNVDYSSVMLTSEEEIKTTNPVATEQYGVVAD |
| | NLQQQNAAPIVGAVNSQGALPGMVWQNRDVYLQGPIWAKIPHTDGNFHPSPLMGGFGLKHPP |
| | PQILIKNTPVPADPPTTFSQAKLASFITQYSTGQVSVEIEWELQKENSKRWNPEIQYTSNYYKSTNVD |
| | FAVNTEGTYSEPRPIGTRYLTRSL |
| SEQ ID | MAADGYLPDWLEDNLSEGIREWWDLKPGAPKPKANQQKQDDGRGLVLPGYKYLGPFNGLDKGE |
| NO: 117 | PVNAADAAALEHDKAYDQQLKAGDNPYLRYNHADAEFQERLQEDTSFGGNLGRAVFQAKKRVLE |
| (AAVrh.35 | PLGLVEEGAKTAPGKKRPIDSPDSSTGIGKKGQQPAKKKLNFGQTGDSESVPDPQPLGEPPAAPSS |
| (AAO88186)) | VGSGTMAAGGGAPMADNNEGADGVGNASGNWHCDSTWLGDRVITTSTRTWALPTYNNHLYK |
| | QISSSSSGATNDNHYFGYSTPWGYFDFNRFHCHFSPRDWQRLINNNWGFRPKKLRFKLFNIQVKE |
| | VTTNDGVTTIANNLTSTVQVFSDSEYQLPYVLGSAHQGCLPPFPADVFMIPQYGYLTLNNGSQSVG |
| | RSSFYCLEYFPSQMLRTGNNFEFSYSFEDVPFHSSYAHSQSLDRLMNPLIDQYLYYLARTQSTTGSTR |
| | ELQFHQAGPNTMAEQSKNWLPGPCYRQQGLSKNLDFNNNSNFAWTAATKYHLNGRNSLTNPGI |
| | PMATNKDDEDQFFPINGVLVFGKTGAANKTTLENVLMTSEEEIKTTNPVATEEYGVVSSNLQPSTA |
| | GPQSQTINSQGALPGMVWQNRDVYLQGPIWAKIPHTDGNFHPSPLMGGFGLKHPPPQILIKNTP |
| | VPANPPEVFTPAKFASFITQYSTGQVSVEIEWELQKENSKRWNPEIQYTSNYAKSNNVEFAVNPDG |
| | VYTEPRPIGTRYLPRNL |
| SEQ ID | MAADGYLPDWLEDNLSEGIREWWDLKPGAPKPKANQQKQDDGRGLVLPGYKYLGPFNGLDKGE |
| NO: 118 | PVNAADAAALEHDKAYDQQLEAGDNPYLRYNHADAEFQERLQEDTSFGGNLGRAVFQAKKRVLE |
| (AAVrh.43 | PLGLVEEGAKTAPGKKRPVEQSPQEPDSSSGIGKKGQQPARKRLNFGQTGDSESVPDPQPLGEPP |
| (AAS99245)) | AAPSGVGPNTMAAGGGAPMADNNEGADGVGSSSGNWHCDSTWLGDRVITTSTRTWALPTYN |
| | NHLYKQISNGTSGGATNDNTYFGYSTPWGYFDFNRFHCHFSPRDWQRLINNNWGFRPKRLSFKLF |
| | NIQVKEVTQNEGTKTIANNLTSTIQVFTDSEYQLPYVLGSAHQGCLPPFPADVFMIPQYGYLTLNNG |
| | SQAVGRSSFYCLEYFPSQMLRTGNNFQFTYTFEDVPFHSSYAHSQSLDRLMNPLIDQYLYYLSRTQT |
| | TGGTANTQTLGFSQGGPNTMANQAKNWLPGPCYRQQRVSTTTGQNNNSNFAWTAGTKYHLN |
| | GRNSLANPGIAMATHKDDEERFFPVTGSCFWQQNAARDNADYSDVMLTSEEEIKTTNPVATEEY |
| | GIVADNLQQQNTAPQIGTVNSQGALPGMVWQNRDVYLQGPIWAKIPHTDGNFHPSPLMGGFG |
| | LKHPPPQILIKNTPVPADPPTTFNQSKLNSFITQYSTGQVSVEIEWELQKENSKRWNPEIQYTSNYYK |
| | STSVDFAVNTEGVYSEPRPIGTRYLTRNL |
| SEQ ID | MAADGYLPDWLEDNLSEGIREWWDLKPGAPKPKANQQKQDDGRGLVLPGYKYLGPFNGLDKGE |
| NO: 119 | PVNAADAAALEHDKAYDQQLKAGDNPYLRYNHADAEFQERLQEDTSFGGNLGRAVFQAKKRVLE |
| (AAVrh.48 | PLGLVEEAAKTAPGKKRPVEPSPQRSPDSSTGIGKKGQQPARKRLNFGQTGDSESVPDPQPIGEPP |
| (AAS99246)) | AGPSGLGSGTMAAGGGAPMADNNKGADGVGNASGNWHCDSTWLGDRVITTSTRTWALPTYN |
| | NHLYKQISSQSAGSTNDNVYFGYSTPWGYFDFNRFHCHFSPRDWQRLINSNWGFRPKKLNFKLFN |
| | IQVKEVTTNDGVTTIANNLTSTVQVFSDSEYQLPYVLGSAHQGCLPPFPADVFMIPQYGYLTLNNG |
| | SQSVGRSSFYCLEYFPSQMLRTGNNFTFSYTFEDVPFHSSYAHSQSLDRLMNPLIDQYLYYLARTQS |
| | NAGGTAGNRELQFYQGGPTTMAEQAKNWLPGPCFRQQRVSKTLDQNNNSNFAWTGATKYHLN |
| | GRNSLVNPGVAMATHKDDEERFFPSSGVLIFGKTGAANKTTLENVLMTNEEEIRPTNPVATEEYGT |
| | VSSNLQAANTAAQTQVVNNQGALPGMVWQNRDVYLQGPIWAKIPHTDGNFHPSPLMGGFGLK |
| | HPPPQILIKNTPVPANPPEVFTPAKFASFITQYSTGQVSVEIEWELQKENSKRWNPEIQYTSNFDKQ |
| | TGVDFAVDSQGVYSEPRPIGTRYLTRNL |
| SEQ ID | MAADGYLPDWLEDNLSEGIREWWDLKPGAPKPKANQQKQDDGRGLVLPGYKYLGPFNGLDKGE |
| NO: 120 | PVNAADAAALEHDKAYDQQLKAGDNPHLRYNHADAEFQERLQEDTSFGGNLGRAVFQAKKRVLE |
| (AAVrh.49 | PLGLVEEGAKTAPGKKRPVEPSPQRSPDSSTGIGKKGQQPARKRLNFGQTGDSESVPDPQLIGEPP |
| (AAS99247)) | AAPSSVGSGTMAAGGGAPMADNNEGADGVGSSSGNWHCDSTWLGDRVITTSTRTWALPTYNN |
| | HLYKQISNGTSGGSTNDNTYFGYSTPWGYFDFNRFHCHFSPRDWQRLINNNWGFRPKRLSFKLFN |
| | IQVKEVTQNEGTKTIANNLTSTIQVFTDSEYQLPYVLGSAHQGCLPPFPADVFMIPQYGNLTLNNGS |
| | QAVGRSSFYCLEYFPSQMLRTGNNFSFSYTFEDVPFHSSYAHSQSLDRLMNPLIDQYLYYLSRTQST |
| | GGTAGTQQLLFSQAGPSNMSAQARNWLPGPCYRQQRVSTTLSQNNNSNFAWTGATKYHLNGR |
| | DSLVNPGVAMATNKDDEDRFFPSSGILMFGKQGAGKDNMGYSNVMLTSEEEIKTTNPVATEQYG |
| | VVADNLQQQNTAPIVGAVNSQGALPGMVWQNRDVYLQGPIWAKIPHTDGNFHPSPLMGGFGL |
| | KHPPPQILIKNTPVPADPPTAFNQAKLNSFITQYGTGQVSVEIEWELQKENSKRWNPEIQYTSNYYK |
| | STNVDFAVNTEGVYSEPRPIGTRYLTRNL |
| SEQ ID | MAADGYLPDWLEDNLSEGIREWWDLKPGAPKPKANQQKQDDGRGLVLPGYKYLGPFNGLDKGE |
| NO: 121 | PVNAADAAALEHDKAYDQQLKAGDNPYLRYNHADAEFQERLQEDTSFGGNLGRAVFQAKKRVLE |
| (AAVrh.50 | PLGLVEEGAKTAPGKKRPVEPSPQRSPDSSTGIGKKGQQPAGKRLNFGQTGDSESVPDPQPIGEPP |
| (AAS99248)) | AAPSSVGSGTMAAGGGAPMADNNEGADGVGSSSGNWHCDSTWLGDRVITTSTRTWALPTYNN |
| | HLYKQISNGTSGGSTNDNTYFGYSTPWGYFDFNRFHCHFSPRDWQRLINNNWGFRPKRLSFKLFN |
| | IQVKEVTQNEGTKTIANNLTSTIQVFTDSEYQLPYVLGSAHQGCLPPFPADVFMIPQYGYLTLNNGS |
| | QAVGRSSFYCLEYFPSQMLRTGNNFSFSYTFEDVPFHSSYAHSQSLDRLMNPLVDQYLYYLSRTQST |
| | GGTAGTQQLLFSQAGPSNMSAQARNWLPGPCYRQQRVSTTLSQNNNSNFAWTGATKYHLNGR |
| | DSLVNPGVAMATNKDDEDRFFPSSGILMFGKQGAGKDNVDYSNVMLTSEEEIKTTNPVATEQYG |
| | VVADNLQQQNTAPIVGAVNSQGALPGMVWQNRDVYLQGPIWAKIPHTDGNFHPSPLMGGFGL |
| | KHPPPQILIKNTPVPADPPTAFNQAKLNSFITQYSTGQVSVEIEWELQKENSKRWSPEIQYTSNYYKS |
| | TNVDFAVNTEGVYSEPRPIGTRYLTRNL |
| SEQ ID | MVADGYLPDWLEDNLSEGIREWWDLKPGAPKPKANQQKQGDGRGLVLPGYKYLGPFNGLDKGE |
| NO: 122 | PVNAADAAALEHDKAYDQQLKAGDNPYLRYNHADAELQERLQEDTSFGGNLGRAVFQAKKRVLE |
| (AAVrh.51 | PLGLVEEGAKTAPGKKRPVEPSPQRSPDSSTGIGKKGQQPARKRLNFGQTGDSESVPDPQPIGEPP |
| (AAS99249)) | AAPSSVGSGTMAAGGGAPMADNNEGADGVGSSSGNWHCDSTWLGDRVITTSTRTWALPTYNN |
| | HLYKQISNGTSGGSTNDNTYFGYSTPWGYFDFNRFHCHFSPRDWQRLINNNWGFRPKRLSFKLFN |
| | IQVKEVTQNEGTKTIANNLTSTIQVFTDSEYQLPYVLGSAHQGCQPPFPADVFMIPQYGYLTLNNGS |
| | QAVGRSSFYCLEYFPSQMLRTGNNFSFSYTFEDVPFHSSYAHSQSLDRLMNPLIDQYLYYLSRTQST |
| | GGTAGTQQLLFSQAGPSNMSAQARNWLPGPCYRQQRVSTTLSQNNNSNFAWTGATKYHLNGR |
| | DSLVNPGVAMATNKDDEDRFFPSSGILMFGKQGAGKDNVDYSNVMLTSEEEIKTTNPVATEQYG |
| | VVADNLQQONTAPIVGAVNSQGALPGMVWQNRDVYLQGPIWAKIPHTDGNFHPSPLMGGFGL |
| | KHPPPQILIKNTPVPADPPTAFNOAKLNSFITQYSTGQVSVEIEWEPQKENSKRWNPEIQYTSNYYK |
| | STNVDFAVNTEGVYSEPRPIGTRYLTRNL |
| SEQ ID | MAADGYLPDWLEDNLSEGIREWWDLKPGAPKPKANQQKQDDGRGLVLPGYKYLGPFNGLDKGE |
| NO: 123 | PVNAADAAALEHDKAYDQQLKAGDNPYLRYNHADAEFQERLQEDTSFGGNLGRAVFQAKKRVLE |
| (AAVrh.52 | PLGLVEEGAKTAPGKKRPVEPSPQRSPDSSTGIGKKGQQPARKRLNFGQTGDSESVPDPQPIGEPP |
| (AAS99250)) | AAPSSVGSGTMAAGGGAPMADNNEGADGVGSSSGNWHCDSTWLGDRVITTSTRTWALPTYNN |
| | HLYKQISNGTSGGSTNDNTYFGYSTPWGYFDFNRFHCHFSPRDWQRLINNNWGFRPKRLSFKLFN |
| | IQVKEVTQNEGTKTIANSLTSTIQVFTDSEYQLPYVLGSAHQGCLPPFPADVFMIPQYGYLTPNNGS |
| | QAVGRSSFYCLEYFPSQMLRTGNNFSFSYTFEDVPFHSSYAHSQSLDRLMNPLIDQYLYYLSRTQST |
| | GGTAGTQQLLSSQAGPSNMSAQARNWLPGPCYRQQRVSTTLSQNNNSNFAWTGATKYHLNGR |
| | DSLVNPGVAMATNKDDEDRFFPSSGILMFGKQGAGKDNVDYSNVMLTSEEEIKTTNPVATEQYG |
| | VVADNLQQQNTAPIVGAVNSQGALPGMVWQNRDVYLQGPIWAKIPHTDGNFHPSPLMGGFGL |
| | KHPPPQILIKNTPVPADPPTAFNQAKLNSFITQYSTGQVSVEIEWELQKENSKRWNPEIQYTSNYYK |
| | STNVDFAVNTEGVYSEPRPIGTRYLTRNL |
| SEQ ID | MAADGYLPDWLEDNLSEGIREWWDLKPGAPKPKANQQKQDDGRGLVLPGYKYLGPFNGLDKGE |
| NO: 124 | PVNAADAAALEHDKAYDQQLKAGDNPYLRYNHADAEFQERLQEDTSFGGNLGRAVFQAKKRVLE |
| (AAVrh.53 | PLGLVEEGAKTAPGKKRPVEPSPQRSPDSSTGIGKKGQQPARKRLNFGQTGDSESVPDPQPIGEPP |
| (AAS99251)) | AAPSSVGSGTMAAGGGAPMADNNEGADGVGSSSGNWHCDSTWLGDRVITTSTRTWALPTYNN |
| | HLYKQISNGTSGGSTNDNTYFGYSTPWGYFDFNRFHCHFSPRDWQRLINNNWGFRPKRLSFKLFN |
| | IQVKEVTQNEGTKTIANNLTSTIQVFTDSEYQLPYVLGSAHQGCLPPFPADVFMIPQYGYLTLNNGS |
| | QAVGRSSFYCLEYFPSQMLRTGNNFSFSYTFEDVPFHSSYVHSQSLDRLMNPLIDQYLYYLSRTQST |
| | GGTAGTQQLLFSQAGPSNMSAQARNWLPGPCYRQQRVSTTLSQNNNSNFAWTGATKYHLNGR |
| | DSLVNSGVAMATNKDDEDRFFPSSGILMFGKQGAGKDNVDYSNVMLTSEEEIKTTNPVATEQYG |
| | VVADNLQQQNTAPIVGAVNSQGALPGMVWQNRDVYLQGPIWAKIPHTDGNFHPSPLMGGFGL |
| | KHPPPQILIKNTPVPADPPTAFNQAKLNSFITQYSTGQVSVEIEWELQKENSKRWNPEIQYTSNYYK |
| | STNVDFAVNTEGVYSEPRPIGTRYPTRNL |
| SEQ ID | MAADGYLPDWLEDNLSEGIREWWDLKPGAPKPKANQQKQDDGRGLVLPGYKYLGPFNGLDKGE |
| NO: 125 | PVNAADAAALEHDKAYDQQLKAGDNPYLRYNHADAEFQERLQEDTSFGGNLGRAVFQAKKRVLE |
| (AAVrh.54 | PLGLVEEAAKTAPGKKRPVEPSPQRSPDSSTGIGKKGQQPARKRLNFGQTGDSESVPDPQPLGEPP |
| (AAS99252)) | AGPSGLGSGTMAAGGGAPMADNNEGADGVGNASGNWHCDSTWLGDRVITTSTRTWALPTYN |
| | NHLYKQISSQSAGSTNDNVYFGYSTPWGYFDFNRFHCHFSPRDWQRLINNNWGFRPKKLNFKLF |
| | NIQVKEVTTNDGVTTIANNLTSTVQVFSDSEYQLPYVLGSAHQGCLPPFPADVFMIPQYGYLTLNN |
| | GSQSVGRSSFYCLEYFPSQVLRTGNNFTFSYTFEDVPFHSSYAHSQSLDRLMNPLIDQYLYYLARTQS |
| | NPGGTSGNRELQFYQGGPSTMAEQAKNWLPGPCFRQQRVSKTLDQNNNSNFAWTGATKYHLN |
| | GRNSLVNPGVAMATHKDDEDRFFPSSGVLIFGKTGATNKTTLENVLMTNEEEIRPTNPVATEEYGI |
| | VSSNLQAANTAAQTQVVNNQGALPGMVWQNRDVYLQGPIWAKIPHTDGNFHPSPLMGGFGLK |
| | HPPPQILIKNTPVPANPPEVFTPAKFASFITQYSTGQVSVEIEWELQKENSKRWNPEIQYTSNFDKQ |
| | TGVDFAVDSQGVYSEPRPIGTRYLTRNL |
| SEQ ID | MAADGYLPDWLEDNLSEGIREWWDLKPGAPKPKANQQKQDDGRGLVLPGYKYLGPFNGLDKGE |
| NO: 126 | PVNAADAAALEHDKAYDQQLKAGDNPYLRYNHADAEFQERLQEDTSFGGNLGRAVFQAKKRVLE |
| (AAVrh.55 | PLGLVEEGAKTAPGKKRPVEPSPQRSPDSSTGIGKKGQQPARKRLNFGQTGDSESVPDPQPIGEPP |
| (AAS99253)) | AAPSSVGSGTMAAGGGAPMADNNEGADGVGSSSGNWHCDSTRLGDRVITTSTRTWALPTYNN |
| | HLYKQISSQSAGSTNDNVYFGYSTPWGYFDFNRFHCHFSPRDWQRLINNNWGFRPKKLNFKLFNI |
| | QVKEVTTNDGVTTIANNLTSTVQVFSDSEYQLPYVLGSAHQGCLPPFPADVFMIPQYGYLTLNNGS |
| | QSVGRSSFYCLEYFPSQMLRTGNNFTFSYTFEDVPFHSSYAHSQSLDRLMNPLIDQYLYYLARTQSN |
| | AGGTAGNRELQFYQGGPTTMAEQAKNWLPGPCFRQRRVSKTLDQNNNSNFAWTGATKYHLNG |
| | RNSLVNPGVAMATHKDDEERFFPSSGVLIFGKTGAANKTTLENVLMTNEEEIRPTNPVATEEYGTV |
| | SSNLQAANTAAQTQVVNNQGALPGMVWQNRDVYLQGPIWAKIPHTDGNFHPSPLMGGFGLKH |
| | PPPQILIKNTPVPANPPEVFTPAKFASFITQYSTGQVSVEIEWELQKENSKRWNPEIQYTSNFDKQT |
| | GVDFAVDSQGVYSEPRPIGTRYLTRNL |
| SEQ ID | MAADGYLPDWLEDNLSEGIREWWALKPGAPKPKANQQKQDDGRGLVLPGYKYLGPFNGLDKGE |
| NO: 127 | PVNAADAAALEHDKAYDQQLQAGDNPYLRYNHADAEFQERLQEDTSFGGNLGRAVFQAKKRVLE |
| (AAVrh.57 | PLGLVEEGAKTAPGKKRPVEPSPQRSPDSSTGIGKKGQQPARKRLNFGQTGDSESVPDPQPIGEPP |
| (AAS99254)) | AAPSSVGSGTMAAGGGAPMADNNEGADGVGSSSGNWHCDSTWLGDRVITTSTRTWALPTYNN |
| | HLYKQTSNGTSGGSTNDNTYFGYSTPWGYFDFNRFHCHFSPRDWQRLINNNWGFRPKRLSFKLF |
| | NIQVKEVTQNEGTKTIANNLTSTIQVFTDSEYQLPYVLGSAHQGCLPPFPADVFMIPQYGYLTLNNG |
| | SQAVGRSSFYCLEYFPSQMLRTGNNFSFSYTFEDVPFHSSYAHSQSLDRLMNPLIDQYLYYLSRTQS |
| | TGGTAGTQQLLFSQAGPSNMSAQARNWLPGPCYRQQRVSTTLSQNNNSNFÅWTGATKYHLNG |
| | RDSLVNPGVAMATNKDDEDRFFPSSGILMFGKQGAGKDNVDYSNVMLTSEEEIKTTNPVATEQY |
| | GVVADNLQQQNTAPIVGAVNSQGALPGMVWQNRDVYLQGPIWAKIPHTDGNFHPSPLMGGF |
| | GLKHPPPQILIKNTPVPADPPTAFNQAKLNSFITQYSTGQVSAEIEWELQKENSKRWNPEIQYTSNY |
| | YKSTNVDFAVNTEGVYSEPRPIGTRYLTRNL |
| SEQ ID | MAADGYLPDWLEDNLSEGIREWWDLKPGAPKPKANQQKQDDGRGLVLPGYKYLGPFNGLDKGE |
| NO: 128 | PVNAADAAALEHDKAYDQQLKAGDNPYLRYNHADAEFQERLQEDTSFGGNLGRAVFQAKKRVLE |
| (AAVrh.58 | PLGLVEEAAKTAPGKKRPVEPSPQRSPDSSTGIGKKGQQPARKRLNFGQTGDSESVPDPQPIGEPP |
| (AAS99255)) | AAPSSVGSGTMAAGGGAPMADNNEGADGVGSSSGNWHCDSTWLGDRVITTSTRTWALPTYNN |
| | HLYKQISNGTSGGSTNDNTYFGYSTPWGYFDFNRFHCHFSPRDWQRLINNNWGFRPKRLSFKLFN |
| | IQVKEVTQNEGTKTIANNLTSTIQVFTDSEYQLPYVLGSAHQGCLPPFPADVFMIPQYGYLTLNNGS |
| | QAVGRSSFYCLEYFPSQMLRTGNNFSFSYTFEDVPFHSSYAHSQSLDRLMNPLIDQYLYYLSRTQST |
| | GGTAGTQQLLFSQAGPSNMSAQARNWLPGPCYRQQRVSTTLSQNNNSNFAWTGATKYHLNGR |
| | DSLVNPGVAMATNKDDEDRFFPSSGILMFGKQGAGKDNVDYSNVMLTSEEEIKTTNPVATEQYG |
| | VVADNLQQQNTAPIVGAVNSQGALPGMVWQNRDVYLQGPIWAKIPHTDGNFHPSPLMGGFGL |
| | KHPPPQILIKSTPVPADPPTAFNOAKLNSFITQYSTGQVSVEIEWELQKENSKCWNPEIQYTSNYYKS |
| | TNVDFAVNTEGVYSEPRPIGTRYLTRNL |
| SEQ ID | MAADGYLPDWLEDNLSEGIREWWDLKPGAPKPKANQQKQDDGRGLVLPGYKYLGPFNGLDKGE |
| NO: 129 | PVNAADAAALEHDKAYDQQLKAGDNPYLRYNHADAEFQERLQEDTSFGGNLGRAVFQAKKRVLE |
| (AAVrh.62 | PLGLAEEAAKTAPGKKRPVEPSPQRSPDSSTGIGKKGQQPARKRLNFGQTGDSESVPDPQPIGEPP |
| (AAS99258)) | AGPSGLGSGTMAAGGGAPMADNNKGADGVGNASGNWHCDSTWLGDRVITTSTRTWALPTYN |
| | NHLYKQISSQSAGSTNDNVYFGYSTPWGYFDFNRFHCHFSPRDWQRLINNNWGFRPKKLNFKLF |
| | NIQVKEVTTGDGVTTIANNLTSTVQVFSDSEYQLPYVLGSAHQGCLPPFPADVFMIPQYGYLTLNN |
| | DSQSVGRSSFYCLEYFPSQMLRTGNNFTFSYTFEDVPFHSSYAHSQSLDRLMNPLIDQYLYYLARTQ |
| | SNAGGTAGNRELQFYQGGPTTMAEQAKNWLPGPCFRQQRVSKTLDQNNNSNFAWTGATKYHL |
| | NGRNSLVNPGVAMATHKDDEERFFPSSGVLIFGKTGAANKTTLENVLMTNEEEIRPTNPVATEEYG |
| | TVSSNLQAANTAAQTQVVNNQGALPGMVWQNRDVYLQGPIWAKIPHTDGNFHPSPLMGGFGL |
| | KHPPPQILIKNTPVPANPPEVFTPAKFASFITQYSTGQVSVEIEWELQKENSKRWNPEIQYTSNFDK |
| | QTGVDFAVDSQGVYSEPRPIGTRYLTRNL |
| SEQ ID | MAADGYLPDWLEDNLSEGIREWWDLKPGAPKPKANQQKQDDGRGLVLPGYKYLGPFNGLDKGE |
| NO: 130 | PVNAADAAALEHDKAYDQQLKAGDNPYLRYNHADAEFQERLQEDTSFGGNLGRAVFQAKKRVLE |
| (AAVrh.64 | PLGLVEEGAKTAPGKKRPVEPSPQRSPDSSTGIGKKGQQPARKRLNFGQTGDSESVPDPQPIGEPP |
| (AAS99259)) | AAPSSVGSGTMAAGGGAPMADNNEGADGVGSSSGNWHCDSTWLGDRVITTSTRTWALPTYNN |
| | HLYKQISNGTSGGSTNDNTYFGYSTPWGYFDFNRFHCHFSPRDWQRLINNNWGFRPKRLSFKLFN |
| | IQVKEVTQNEGTKTIANNLTSTIQVFTDSEYQLPYVLGSAHQGCLPPFPADVFMIPQYGYLTLNNGS |
| | QAVGRSSFYCLEYFPSQMLRTGNNFSFSYTFEDVPFHSSYAHSQSLDRLMNPLIDQYLYYLSRTQST |
| | GGTAGTQQLLFSQAGPSNMSAQARNWLPGPCYRQQRVSTTLSQNNNSNFAWTGATKYHLNGR |
| | DSLVNPGVAMATNKDDEDRFFPSSGILMFGKQGAGKDNVDYSNVMLTSEEEIKTTNPVATEQYG |
| | VVADNLQQQNTAPIVGAVNSQGALPGMVWQNRDVYLQGPIWAKIPHTDGNFHPSPLMGGFGL |
| | KHPPPQILIKNTPVPADPPTAFNQAKLNSFITQYSTGQVSVEIVWELQKENSKRRNPEIQYTSNYYKS |
| | TNVDFAVNTEGVYSEPRPIGTRYLTRNL |
| SEQ ID | MAADGYLPDWLEDTLSEGIRQWWKLKPGPPPPKPAERHKDDSRGLVLPGYKYLGPFNGLDKGEP |
| NO: 131 | VNEADAAALEHDKAYDRQLDSGDNPYLKYNHADAEFQERLKEDTSFGGNLGRAVFQAKKRVLEPL |
| (AAVrh.56 | GLVEEPVKTAPGKKRPVEHSPAEPDSSSGTGKAGQQPARKRLNFGQTGDADSVPDPQPLGQPPA |
| (JA400164)) | APSGLGSTTMATGSGAPMADNNEGADGVGNSSGNWHCDSQWLGDRVITTSTRTWAQPTYNN |
| | HLYKQISSQSGASNDNHYFGYSTPWGYFDFNRFHCHFSPRDWQRLINNNWGFRPKRLNFKLFNIQ |
| | VKEVTQNDGTTTIANNLTSTVQVFTDSEYQLPYVLGSAHQGCLPPFPADVFMVPQYGYLTLNNGS |
| | QAVGRSSFYCLEYFPSQMLRTGNNFQFSYTFEDVPFHSSYAHSQSLDRLMNPLIDQYLYYLNKTQS |
| | NSGALQQSRLLFSQAGPTSMSLQAKNWLPGPCYRQQRLSKQANDNNNSNFPWTAATKYHLNGR |
| | DSLVNPGPAMASHKDDEEKFFPMHGTLIFGKQGTNANDADLDNVMITDEEEIRTTNPVATEQYG |
| | YVSNNLQNSNTGPTTGTVNHRGALPGMVWQDRDVYLQGPIWAKIPHTDGHFHPSPLMGGFGL |
| | KHPPPQIMIKNTPVPANPPTNFSSAKFASFITQYSTGQVSVEIEWELQKENSKRWNPEIQYTSNYNK |
| | SVNVDFTVDTNGVYSEPRPIGTRYLTRNL |
| SEQ ID | MAADGYLPDWLEDNLSEGIREWWDLKPGAPKPKANQQKQDDGRGLVLPGYKYLGPFNGLD |
| NO: 132 | KGEPVNAADAAALEHDKAYDQQLKAGDNPYLRYNHADAEFQERLQEDTSFGGNLGRAVFQ |
| (Anc80) | AKKRVLEPLGLVEEGAKTAPGKKRPVEQSPQEPDSSSGIGKKGQQPAXKRLNFGQTGDSE |
| | SVPDPQPLGEPPAAPSGVGSNTMAXGGGAPMADNNEGADGVGNASGNWHCDSTWLGDRVI |
| | TTSTRTWALPTYNNHLYKQISSQSGXSTNDNTYFGYSTPWGYFDFNRFHCHFSPRDWQRL |
| | INNNWGFRPKXLNFKLFNIQVKEVTTNDGTTTIANNLTSTVQVFTDSEYQLPYVLGSAHQ |
| | GCLPPFPADVFMIPQYGYLTLNNGSQAVGRSSFYCLEYFPSQMLRTGNNFXFSYTFEDVP |
| | FHSSYAHSQSLDRLMNPLIDQYLYYLSRTQTTSGTAGNRXLQFSQAGPSSMANQAKNWLP |
| | GPCYRQQRVSKTXNQNNNSNFAWTGATKYHLNGRDSLVNPGPAMATHKDDEDKFFPMSGV |
| | LIFGKQGAGNSNVDLDNVMITXEEEIKTTNPVATEXYGTVATNLQSXNTAPATGTVNSQG |
| | ALPGMVWQXRDVYLQGPIWAKIPHTDGHFHPSPLMGGFGLKHPPPQILIKNTPVPANPPT |
| | TFSPAKFASFITQYSTGQVSVEIEWELQKENSKRWNPEIQYTSNYNKSTNVDFAVDTNGV |
| | YSEPRPIGTRYLTRNL |
| | (168) . . . (168) Lys or Arg |
| | (205) . . . (205) Ala or Ser |
| | (266) . . . (266) Ala or Gly |
| | (311) . . . (311) Arg or Lys |
| | (411) . . . (411) Glu or Gln |
| | (460) . . . (460) Thr or Glu |
| | (493) . . . (493) Ala or Thr |
| | (562) . . . (562) Ser or Asn |
| | (576) . . . (576) Gln or Glu |
| | (587) . . . (587) Ser or Ala |
| | (609) . . . (609) Asn or Asp |
| SEQ ID | MAADGYLPDWLEDNLSEGIREWWDLKPGAPKPKANQQKQDDGRGLVLPGYKYLGPFNGLD |
| NO: 133 | KGEPVNAADAAALEHDKAYDQQLKAGDNPYLRYNHADAEFQERLQEDTSFGGNLGRAVFQ |
| (Anc81 | AKKRVLEPLGLVEEGAKTAPGKKRPVEQSPQEPDSSXGIGKKGQQPAXKRLNFGQTGDSE |
| (AKU89596)) | SVPDPQPLGEPPAAPSGVGSNTMAAGGGAPMADNNEGADGVGNASGNWHCDSTWLGDRVI |
| | TTSTRTWALPTYNNHLYKQISXXQSGGSTNDNTYFGYSTPWGYFDFNRFHCHFSPRDWQR |
| | LINNNWGFRPKXLNFKLFNIQVKEVTTNDGTTTIANNLTSTVQVFTDSEYQLPYVLGSAH |
| | QGCLPPFPADVFMIPQYGYLTLNNGSQAVGRSSFYCLEYFPSQMLRTGNNFXFSYTFEDV |
| | PFHSSYAHSQSLDRLMNPLIDQYLYYLSRTQTTGGTAGNXXLQFSQAGPSSMANQAKNWL |
| | PGPCYRQQRVSKTTNQNNNSNFAWTGATKYHLNGRDSLVNPGVAMATHKDDEDRFFPSSG |
| | VLIFGKQGAGNXNVDXXNVMITXEEEIKTTNPVATEEYGXVATNLQSXNTAPQTGTVNSQ |
| | GALPGMVWQNRDVYLQGPIWAKIPHTDGNFHPSPLMGGFGLKHPPPQILIKNTPVPANPP |
| | TTFXPAKFASFITQYSTGQVSVEIEWELQKENSKRWNPEIQYTSNYNKSTNVDFAVDTEG |
| | VYSEPRPIGTRYLTRNL |
| | (157) . . . (157) Thr or Ser |
| | (168) . . . (168) Lys or Arg |
| | (262) . . . (262) Asn or Ser |
| | (263) . . . (263) Ser or His |
| | (312) . . . (312) Arg or Lys |
| | (412) . . . (412) Glu or Gln |
| | (460) . . . (460) Arg or Gln |
| | (461) . . . (461) Thr or Glu |
| | (552) . . . (552) Asp or Ser |
| | (556) . . . (556) Leu or Tyr |
| | (557) . . . (557) Asp or Ser |
| | (563) . . . (563) Ser or Asn |
| | (580) . . . (580) Val or Ile |
| | (588) . . . (588) Asn or Ser |
| | (664) . . . (664) Ser or Thr |
| SEQ ID | MAADGYLPDWLEDNLSEGIREWWDLKPGAPKPKANQQKODDGRGLVLPGYKYLGPFNGLD |
| NO: 134 | KGEPVNAADAAALEHDKAYDQQLKAGDNPYLRYNHADAEFQERLQEDTSFGGNLGRAVFQ |
| (Anc82 | AKKRVLEPLGLVEEGAKTAPGKKRPVEQSPQREPDSSXGIGKKGQQPAXKRINFGQTGDS |
| (AKU89597)) | ESVPDPQPLGEPPAAPSGVGSNTMAAGGGAPMADNNEGADGVGNSSGNWHCDSTWLGDRV |
| | ITTSTRTWALPTYNNHLYKQISNGTSGGSTNDNTYFGYSTPWGYFDFNRFHCHFSPRDWQ |
| | RLINNNWGFRPKRLNFKLFNIQVKEVTTNEGTKTIANNLTSTVQVFTDSEYQLPYVLGSA |
| | HQGCLPPFPADVFMIPQYGYLTLNNGSQAVGRSSFYCLEYFPSQMLRTGNNFQFSYTFED |
| | VPFHSSYAHSQSLDRLMNPLIDQYLYYLSRTQTTGGTAGTQTLQFSQAGPSSMANQAKNW |
| | LPGPCYRQQRVSTTTNONNNSNFAWTGATKYHLNGRDSLVNPGVAMATHKDDEDRFFPSS |
| | GVLIFGKQGAGNDNVDYSNVMITXEEEIKTTNPVATEEYGVVATNLQSANTAPQTGTVNS |
| | QGALPGMVWQNRDVYLQGPIWAKIPHTDGNFHPSPLMGGFGLKHPPPQILIKNTPVPADP |
| | PTTFNQAKLNSFITQYSTGQVSVEIEWELQKENSKRWNPEIQYTSNYYKSTNVDFAVNTE |
| | GVYSEPRPIGTRYLTRNL |
| | (158) . . . (158) Thr or Ser |
| | (169) . . . (169) Lys or Arg |
| | (564) . . . (564) Ser or Asn |
| SEQ ID | MAADGYLPDWLEDNLSEGIREWWDLKPGAPKPKANQQKQDDGRGLVLPGYKYLGPFNGLD |
| NO: 135 | KGEPVNAADAAALEHDKAYDQQLKAGDNPYLRYNHADAEFQERLQEDTSFGGNLGRAVFQ |
| (Anc83 | AKKRVLEPLGLVEEGAKTAPGKKRPVEQSPQREPDSSXGIGKKGQQPAXKRLNFGQTGDS |
| (AKU89598)) | ESVPDPQPLGEPPAAPSGVGSNTMAAGGGAPMADNNEGADGVGSSSGNWHCDSTWLGDRV |
| | ITTSTRTWALPTYNNHLYKQISNGTSGGSTNDNTYFGYSTPWGYFDFNRFHCHFSPRDWQ |
| | RLINNNWGFRPKRLXFKLFNIQVKEVTQNEGTKTIANNLTSTIQVFTDSEYQLPYVLGSA |
| | HQGCLPPFPADVFMIPQYGYLTLNNGSQAVGRSSFYCLEYFPSQMLRTGNNFXFSYTFED |
| | VPFHSSYAHSQSLDRLMNPLIDQYLYYLSRTQTTGGTAGTQTLQFSQAGPSXMANQAKNW |
| | LPGPCYRQQRVSTTTSQNNNSNFAWTGATKYHLNGRDSLVNPGVAMATHKDDEXRFFPSS |
| | GXLIFGKQGAGKDNVDYSNVMLTSEEEIKTTNPVATEEYGVVADNLQQQNTAPQXGTVNS |
| | QGALPGMVWQNRDVYLQGPIWAKIPHTDGNFHPSPLMGGFGLKHPPPQILIKNTPVPADP |
| | PTTFNQAKLNSFITQYSTGQVSVEIEWELQKENSKRWNPEIQYTSNYYKSTNVDFAVNTE |
| | GVYSEPRPIGTRYLTRNL |
| | (158) . . . (158) Thr or Ser |
| | (169) . . . (169) Arg or Lys |
| | (315) . . . (315) Asn or Ser |
| | (413) . . . (413) Gln or Glu |
| | (472) . . . (472) Asn, Thr or Ser |
| | (534) . . . (534) Asp or Glu |
| | (542) . . . (542) Ile or Val |
| | (595) . . . (595) Ile or Val |
| SEQ ID | MAADGYLPDWLEDNLSEGIREWWDLKPGAPKPKANQQKODDGRGLVLPGYKYLGPFNGLD |
| NO: 136 | KGEPVNAADAAALEHDKAYDQQLKAGDNPYLRYNHADAEFQERLQEDTSFGGNLGRAVFQ |
| (Anc84 | AKKRVLEPLGLVEEGAKTAPGKKRPVEPSPQRSPDSSTGIGKKGQQPAXKRLNFGQTGDS |
| (AKU89599)) | ESVPDPQPIGEPPAAPSGVGSGTMAAGGGAPMADNNEGADGVGSSSGNWHCDSTWLGDRV |
| | ITTSTRTWALPTYNNHLYKQISNGTSGGSTNDNTYFGYSTPWGYFDFNRFHCHFSPRDWQ |
| | RLINNNWGFRPKRLXFKLFNIQVKEVTQNEGTKTIANNLTSTIQVFTDSEYQLPYVLGSA |
| | HQGCLPPFPADVFMIPQYGYLTLNNGSQAVGRSSFYCLEYFPSQMLRTGNNFEFSYTFED |
| | VPFHSSYAHSQSLDRLMNPLIDQYLYYLSRTQSTGGTAGTQQLLFSQAGPSNMSAQAKNW |
| | LPGPCYRQQRVSTTLSQNNNSNFAWTGATKYHLNGRDSLVNPGVAMATHKDDEXRFFPSS |
| | GXLMFGKQGAGKDNVDYSNVMLTSEEEIKTTNPVATEQYGVVADNLQQQNTAPIVGAVNS |
| | QGALPGMVWQNRDVYLQGPIWAKIPHTDGNFHPSPLMGGFGLKHPPPQILIKNTPVPADP |
| | PTTFNQAKLNSFITQYSTGQVSVEIEWELQKENSKRWNPEIQYTSNYYKSTNVDFAVNTE |
| | GVYSEPRPIGTRYLTRNL |
| | (169) . . . (169) Arg or Lys |
| | (315) . . . (315) Asn or Ser |
| | (534) . . . (534) Asp or Glu |
| | (542) . . . (542) Ile or Val |
| SEQ ID | MAADGYLPDWLEDNLSEGIREWWDLKPGAPKPKANQQKQDDGRGLVLPGYKYLGPFNGLD |
| NO: 137 | KGEPVNAADAAALEHDKAYDQQLKAGDNPYLRYNHADAEFQERLQEDTSFGGNLGRAVFQ |
| (Anc94) | AKKRVLEPLGLVEEGAKTAPGKKRPVEPSPQRSPDSSTGIGKKGQQPAKKRLNFGQTGDS |
| | ESVPDPQPIGEPPAGPSGLGSGTMAAGGGAPMADNNEGADGVGSSSGNWHCDSTWLGDRV |
| | ITTSTRTWALPTYNNHLYKQISNGTSGGSTNDNTYFGYSTPWGYFDFNRFHCHFSPRDWQ |
| | RLINNNWGFRPKRLNFKLFNIQVKEVTQNEGTKTIANNLTSTIQVFTDSEYQLPYVLGSA |
| | HQGCLPPFPADVFMIPQYGYLTLNNGSQAVGRSSFYCLEYFPSQMLRTGNNFEFSYTFED |
| | VPFHSSYAHSQSLDRLMNPLIDQYLYYLSRTQSTGGTAGTQQLLFSQAGPXNMSAQAKNW |
| | LPGPCYRQQRVSTTLSQNNNSNFAWTGATKYHLNGRDSLVNPGVAMATHKDDEERFFPSS |
| | GVLMFGKQGAGKDNVDYSSVMLTSEEEIKTTNPVATEQYGVVADNLQQQNTAPIVGAVNS |
| | QGALPGMVWQNRDVYLQGPIWAKIPHTDGNFHPSPLMGGFGLKHPPPQILIKNTPVPADP |
| | PTTFSQAKLASFITQYSTGQVSVEIEWELQKENSKRWNPEIQYTSNYYKSTNVDFAVNTE |
| | GTYSEPRPIGTRYLTRNL |
| | (471) . . . (471) Ser or Asn |
| SEQ ID | MAADGYLPDWLEDNLSEGIREWWDLKPGAPKPKANQQKQDDGRGLVLPGYKYLGPFNGLD |
| NO: 138 | KGEPVNAADAAALEHDKAYDQQLKAGDNPYLRYNHADAEFQERLQEDTSFGGNLGRAVFQ |
| (Anc110 | AKKRVLEPLGLVEEGAKTAPGKKRPVEQSPQEPDSSXLGIGKTGQQPAXKRLNFGQTGDS |
| (AKU89600)) | ESVPDPQPLGEPPAAPSGVGSNTMASGGGAPMADNNEGADGVGNSSGNWHCDSTWLGDRV |
| | ITTSTRTWALPTYNNHLYKQISNGTSGGSTNDNTYFGYSTPWGYFDFNRFHCHFSPRDWQ |
| | RLINNNWGFRPKRLNFKLFNIQVKEVTTNEGTKTIANNLTSTVQVFTDSEYQLPYVLGSA |
| | HQGCLPPFPADVFMIPQYGYLTLNNGSQAVGRSSFYCLEYFPSQMLRTGNNFQFSYTFED |
| | VPFHSSYAHSQSLDRLMNPLIDQYLYYLSRTQTTGTXGTQTLXFSQAGPSSMANQARNWV |
| | PGPCYRQQRVSTTTNONNNSNFAWTGAXKXXLNGRDSLMNPGVAMASHKDDEDRFFPSSG |
| | VLIFGKQGAGNDNVDYSXVMITNEEEIKTTNPVATEEYGAVATNXQXLANTQAQTGLVHN |
| | QGVLPGMVWQNRDVYLQGPIWAKIPHTDGNFHPSPLMGGFGLKHPPPQILIKNTPVPADP |
| | PTTFNQAKLNSFITQYSTGQVSVEIEWELQKENSKRWNPEIQYTSNYYKSTNVDFAVNTE |
| | GVYSEPRPIGTRYLTRNL |
| | (157) . . . (157) Ser or Thr |
| | (169) . . . (169) Lys or Arg |
| | (457) . . . (457) Ala or Gly |
| | (463) . . . (463) Gln or Ala |
| | (508) . . . (508) Thr or Ala |
| | (510) . . . (510) Tyr or Phe |
| | (511) . . . (511) His or Lys |
| | (558) . . . (558) Gln or Asn |
| | (585) . . . (585) Asn or His |
| | (587) . . . (587) Ser or Ala |
| SEQ ID | MAADGYLPDWLEDNLSEGIREWWDLKPGAPKPKANQQKQDDGRGLVLPGYKYLGPFNGLD |
| NO: 139 | KGEPVNAADAAALEHDKAYDQQLKAGDNPYLRYNHADAEFQERLQEDTSFGGNLGRAVFQ |
| (Anc113 | AKKRVLEPLGLVEEGAKTAPGKKRPVEXSPQRSPDSSTGIGKKGQQPAXKRLNFGQTGDS |
| (AKU89601)) | ESVPDPQPLGEPPAAPSGVGSGTMAAGGGAPMADNNEGADGVGNASGNWHCDSTWLGDRV |
| | ITTSTRTWALPTYNNHLYKQISSQSAGSTNDNTYFGYSTPWGYFDFNRFHCHFSPRDWQR |
| | LINNNWGFRPKKLXFKLFNIQVKEVTTNDGVTTIANNLTSTVQVFSDSEYQLPYVLGSAH |
| | QGCLPPFPADVFMIPQYGYLTLNNGSQSVGRSSFYCLEYFPSQMLRTGNNFEFSYTFEDV |
| | PFHSSYAHSQSLDRLMNPLIDQYLYYLARTQSTTGGTAGNRELQFXQAGPSTMAEQAKNW |
| | LPGPCYRQQRVSKTLDQNNNSNFAWTGATKYHLNGRNSLVNPGVAMATHKDDEDRFFPSS |
| | GVLIFGKTGAANKTTLENVLMTXEEEIKTTNPVATEEYGXVSSNLQSXNTAPQTQTVNSQ |
| | GALPGMVWQNRDVYLQGPIWAKIPHTDGNFHPSPLMGGFGLKHPPPQILIKNTPVPANPP |
| | EVFTPAKFASFITQYSTGQVSVEIEWELQKENSKRWNPEIQYTSNYDKSTNVDFAVDSEG |
| | VYSEPRPIGTRYLTRNL |
| | (148) . . . (148) Pro or Gln |
| | (169) . . . (169) Lys or Arg |
| | (314) . . . (314) Arg or Asn |
| | (466) . . . (466) Tyr or His |
| | (563) . . . (563) Asn or Ser |
| | (580) . . . (580) Val or lle |
| | (588) . . . (588) Ala or Ser |
| SEQ ID | MAADGYLPDWLEDNLSEGIREWWDLKPGAPKPKANQQKQDDGRGLVLPGYKYLGPFNGLD |
| NO: 140 | KGEPVNAADAAALEHDKAYDQQLKAGDNPYLRYNHADAEFQERLQEDTSFGGNLGRAVFQ |
| (Anc126 | AKKRVLEPLGLVEEGAKTAPGKKRPVEQSPQEPDSSSGIGKXGQQPAXKRLNFGQTGDSE |
| (AKU89602)) | SVPDPQPLGEPPAAPSGVGSNTMASGGGAPMADNNEGADGVGNXSGNWHCDSTWLGDRVI |
| | TTSTRTWALPTYNNHLYKQISSQSGASNDNHYFGYSTPWGYFDFNRFHCHFSPRDWQRLI |
| | NNNWGFRPKXLNFKLFNIQVKEVTTNDGTTTIANNLTSTVQVFTDSEYQLPYVLGSAHQG |
| | CLPPFPADVFMIPQYGYLTLNNGSQAVGRSSFYCLEYFPSQMLRTGNNFXFSYTFEDVPF |
| | HSSYAHSQSLDRLMNPLIDQYLYYLXRTQTTSGTAQNRELXFSQAGPSSMXNQAKNWLPG |
| | PCYRQQRVSKTANDNNNSNFAWTGATKYHLNGRDSLVNPGPAMASHKDDEDKFFPMSGVL |
| | IFGKQGAGASNVDLDNVMITDEEEIKTTNPVATEQYGTVATNLQSSNTAPATGTVNSQGA |
| | LPGMVWQDRDVYLQGPIWAKIPHTDGHFHPSPLMGGFGLKHPPPQILIKNTPVPANPPTT |
| | FSPAKFASFITQYSTGQVSVEIEWELQKENSKRWNPEIQYTSNYNKSXNVDFTVDTNGVY |
| | SEPRPIGTRYLTRNL |
| | (162) . . . (162) Ser or Thr |
| | (168) . . . (168) Lys or Arg |
| | (224) . . . (224) Ala or Ser |
| | (310) . . . (310) Arg or Lys |
| | (410) . . . (410) Thr or Gln |
| | (446) . . . (446) Ser or Asn |
| | (461) . . . (461) Gln or Leu |
| | (471) . . . (471) Ala or Ser |
| | (708) . . . (708) Ala or Thr |
| SEQ ID | MAADGYLPDWLEDNLSEGIREWWDLKPGAPQPKANQQHQDDXRGLVLPGYKYLGPFNGLD |
| NO: 141 | KGEPVNEADAAALEHDKAYDQQLKAGDNPYLKYNHADAEFQERLQEDTSFGGNLGRAVFQ |
| Anc127 | AKKRVLEPLGLVEEAAKTAPGKKRPVEQSPQEPDSSSGIGKSGQQPAXKRLNFGQTGDSE |
| (AKU89603) | SVPDPQPLGEPPÅAPSGVGSNTMASGGGAPMADNNEGADGVGNSSGNWHCDSTWLGDRVI |
| | TTSTRTWALPTYNNHLYKQISSQSGASNDNHYFGYSTPWGYFDFNRFHCHFSPRDWQRLI |
| | NNNWGFRPKXLNFKLFNIQVKEVTQNDGTTTIANNLTSTVQVFTDSEYQLPYVLGSAHQG |
| | CLPPFPADVFMIPQYGYLTLNNGSQAVGRSSFYCLEYFPSQMLRTGNNFXFSYTFEDVPF |
| | HSSYAHSQSLDRLMNPLIDQYLYYLXRTQTTSGTTQQSRLXFSQAGPSSMXQQAXNWLPG |
| | PCYRQQRVSKTANDNNNSNFAWTXATKYHLNGRDSLVNPGPAMASHKDDEEKFFPMHGXL |
| | IFGKQGTGASNVDLDNVMITDEEEIRTTNPVATEQYGTVATNLQSSNTAPATGTVNSQGA |
| | LPGMVWQDRDVYLQGPIWAKIPHTDGHFHPSPLMGGFGLKHPPPQILIKNTPVPANPPTT |
| | FSPAKFASFITQYSTGQVSVEIEWELQKENSKRWNPEIQYTSNYNKSVNVDFTVDTNGVY |
| | SEPRPIGTRYLTRNL |
| | (42) . . . (42) Gly or Ser |
| | (168) . . . (168) Arg or Lys |
| | (310) . . . (310) Lys or Arg |
| | (410) . . . (410) Thr or Gln |
| | (446) . . . (446) Ser or Arg |
| | (461) . . . (461) Gln or Leu |
| | (471) . . . (471) Ala or Ser |
| | (475) . . . (475) Lys or Arg |
| | (504) . . . (504) Gly or Ala |
| | (539) . . . (539) Val or Asn |
| SEQ ID | MAADGYLPDWLEDNLSEGIREWWDLKPGAPKPKANQQKODDGRGLVLPGYKYLGPFNGLDKGE |
| NO: 142 | PVNAADAAALEHDKAYDQQLKAGDNPYLRYNHADAEFQERLQEDTSFGGNLGRAVFQAKKRVLE |
| (Anc80L65 | PLGLVEEGAKTAPGKKRPVEQSPQEPDSSSGIGKKGQQPARKRLNFGQTGDSESVPDPQPLGEPP |
| (AKU89595)) | AAPSGVGSNTMAAGGGAPMADNNEGADGVGNASGNWHCDSTWLGDRVITTSTRTWALPTYN |
| | NHLYKQISSQSGGSTNDNTYFGYSTPWGYFDFNRFHCHFSPRDWQRLINNNWGFRPKKLNFKLF |
| | NIQVKEVTTNDGTTTIANNLTSTVQVFTDSEYQLPYVLGSAHQGCLPPFPADVFMIPQYGYLTLNN |
| | GSQAVGRSSFYCLEYFPSQMLRTGNNFQFSYTFEDVPFHSSYAHSQSLDRLMNPLIDQYLYYLSRTQ |
| | TTSGTAGNRTLQFSQAGPSSMANQAKNWLPGPCYRQQRVSKTTNQNNNSNFAWTGATKYHLN |
| | GRDSLVNPGPAMATHKDDEDKFFPMSGVLIFGKQGAGNSNVDLDNVMITNEEEIKTTNPVATEEY |
| | GTVATNLQSANTAPATGTVNSQGALPGMVWQDRDVYLQGPIWAKIPHTDGHFHPSPLMGGFG |
| | LKHPPPQILIKNTPVPANPPTTFSPAKFASFITQYSTGQVSVEIEWELQKENSKRWNPEIQYTSNYNK |
| | STNVDFAVDTNGVYSEPRPIGTRYLTRNL |
| SEQ ID | MAADGYLPDWLEDNLSEGIREWWDLKPGAPKPKANQQKQDDGRGLVLPGYKYLGPFNGLDKGE |
| NO: 143 | PVNAADAAALEHDKAYDQQLKAGDNPYLRYNHADAEFQERLQEDTSFGGNLGRAVFQAKKRVLE |
| (Anc80L1) | PLGLVEEGAKTAPGKKRPVEQSPQEPDSSSGIGKKGQQPAKKRLNFGQTGDSESVPDPQPLGEPP |
| | AAPSGVGSNTMAAGGGAPMADNNEGADGVGNASGNWHCDSTWLGDRVITTSTRTWALPTYN |
| | NHLYKQISSQSGASTNDNTYFGYSTPWGYFDFNRFHCHFSPRDWQRLINNNWGFRPKRLNFKLF |
| | NIQVKEVTTNDGTTTIANNLTSTVQVFTDSEYQLPYVLGSAHQGCLPPFPADVFMIPQYGYLTLNN |
| | GSQAVGRSSFYCLEYFPSQMLRTGNNFEFSYTFEDVPFHSSYAHSQSLDRLMNPLIDQYLYYLSRTQ |
| | TTSGTAGNRTLQFSQAGPSSMANQAKNWLPGPCYRQQRVSKTANQNNNSNFAWTGATKYHLN |
| | GRDSLVNPGPAMATHKDDEDKFFPMSGVLIFGKQGAGNSNVDLDNVMITSEEEIKTTNPVATEQY |
| | GTVATNLQSSNTAPATGTVNSQGALPGMVWQNRDVYLQGPIWAKIPHTDGHFHPSPLMGGFGL |
| | KHPPPQILIKNTPVPANPPTTFSPAKFASFITQYSTGQVSVEIEWELQKENSKRWNPEIQYTSNYNKS |
| | TNVDFAVDTNGVYSEPRPIGTRYLTRNL |
| SEQ ID | MAADGYLPDWLEDNLSEGIREWWDLKPGAPKPKANQQKQDDGRGLVLPGYKYLGPFNGLDKGE |
| NO: 144 | PVNAADAAALEHDKAYDQQLKAGDNPYLRYNHADAEFQERLQEDTSFGGNLGRAVFQAKKRVLE |
| (Anc80L27) | PLGLVEEGAKTAPGKKRPVEQSPQEPDSSSGIGKKGQQPARKRLNFGQTGDSESVPDPQPLGEPP |
| | AAPSGVGSNTMAAGGGAPMADNNEGADGVGNASGNWHCDSTWLGDRVITTSTRTWALPTYN |
| | NHLYKQISSQSGGSTNDNTYFGYSTPWGYFDFNRFHCHFSPRDWQRLINNNWGFRPKRLNFKLF |
| | NIQVKEVTTNDGTTTIANNLTSTVQVFTDSEYQLPYVLGSAHQGCLPPFPADVFMIPQYGYLTLNN |
| | GSQAVGRSSFYCLEYFPSQMLRTGNNFEFSYTFEDVPFHSSYAHSQSLDRLMNPLIDQYLYYLSRTQ |
| | TTSGTAGNRTLQFSQAGPSSMANQAKNWLPGPCYRQQRVSKTANQNNNSNFAWTGATKYHLN |
| | GRDSLVNPGPAMATHKDDEDKFFPMSGVLIFGKQGAGNSNVDLDNVMITNEEEIKTTNPVATEQ |
| | YGTVATNLQSANTAPATGTVNSQGALPGMVWQDRDVYLQGPIWAKIPHTDGHFHPSPLMGGF |
| | GLKHPPPQILIKNTPVPANPPTTFSPAKFASFITQYSTGQVSVEIEWELQKENSKRWNPEIQYTSNYN |
| | KSTNVDFAVDTNGVYSEPRPIGTRYLTRNL |
| SEQ ID | MAADGYLPDWLEDNLSEGIREWWDLKPGAPKPKANQQKQDDGRGLVLPGYKYLGPFNGLDKGE |
| NO: 145 | PVNAADAAALEHDKAYDQQLKAGDNPYLRYNHADAEFQERLQEDTSFGGNLGRAVFQAKKRVLE |
| (Anc80L33) | PLGLVEEGAKTAPGKKRPVEQSPQEPDSSSGIGKKGQQPAKKRLNFGQTGDSESVPDPQPLGEPP |
| | AAPSGVGSNTMAAGGGAPMADNNEGADGVGNASGNWHCDSTWLGDRVITTSTRTWALPTYN |
| | NHLYKQISSQSGGSTNDNTYFGYSTPWGYFDFNRFHCHFSPRDWQRLINNNWGFRPKKLNFKLF |
| | NIQVKEVTTNDGTTTIANNLTSTVQVFTDSEYQLPYVLGSAHQGCLPPFPADVFMIPQYGYLTLNN |
| | GSQAVGRSSFYCLEYFPSQMLRTGNNFEFSYTFEDVPFHSSYAHSQSLDRLMNPLIDQYLYYLSRTQ |
| | TTSGTAGNRTLQFSQAGPSSMANQAKNWLPGPCYRQQRVSKTANQNNNSNFAWTGATKYHLN |
| | GRDSLVNPGPAMATHKDDEDKFFPMSGVLIFGKQGAGNSNVDLDNVMITSEEEIKTTNPVATEQY |
| | GTVATNLQSSNTAPATGTVNSQGALPGMVWQNRDVYLQGPIWAKIPHTDGHFHPSPLMGGFGL |
| | KHPPPQILIKNTPVPANPPTTFSPAKFASFITQYSTGQVSVEIEWELQKENSKRWNPEIQYTSNYNKS |
| | TNVDFAVDTNGVYSEPRPIGTRYLTRNL |
| SEQ ID | MAADGYLPDWLEDNLSEGIREWWDLKPGAPKPKANQQKQDDGRGLVLPGYKYLGPFNGLDKGE |
| NO: 146 | PVNAADAAALEHDKAYDQQLKAGDNPYLRYNHADAEFQERLQEDTSFGGNLGRAVFQAKKRVLE |
| (Anc80L36) | PLGLVEEGAKTAPGKKRPVEQSPQEPDSSSGIGKKGQQPAKKRLNFGQTGDSESVPDPQPLGEPP |
| | AAPSGVGSNTMASGGGAPMADNNEGADGVGNASGNWHCDSTWLGDRVITTSTRTWALPTYN |
| | NHLYKQISSQSGGSTNDNTYFGYSTPWGYFDFNRFHCHFSPRDWQRLINNNWGFRPKKLNFKLF |
| | NIQVKEVTTNDGTTTIANNLTSTVQVFTDSEYQLPYVLGSAHQGCLPPFPADVFMIPQYGYLTLNN |
| | GSQAVGRSSFYCLEYFPSQMLRTGNNFEFSYTFEDVPFHSSYAHSQSLDRLMNPLIDQYLYYLSRTQ |
| | TTSGTAGNRTLQFSQAGPSSMANQAKNWLPGPCYRQQRVSKTANQNNNSNFAWTGATKYHLN |
| | GRDSLVNPGPAMATHKDDEDKFFPMSGVLIFGKQGAGNSNVDLDNVMITSEEEIKTTNPVATEEY |
| | GTVATNLQSSNTAPATGTVNSQGALPGMVWQNRDVYLQGPIWAKIPHTDGHFHPSPLMGGFGL |
| | KHPPPQILIKNTPVPANPPTTFSPAKFASFITQYSTGQVSVEIEWELQKENSKRWNPEIQYTSNYNKS |
| | TNVDFAVDTNGVYSEPRPIGTRYLTRNL |
| SEQ ID | MAADGYLPDWLEDNLSEGIREWWDLKPGAPKPKANQQKQDDGRGLVLPGYKYLGPFNGLDKGE |
| NO: 147 | PVNAADAAALEHDKAYDQQLKAGDNPYLRYNHADAEFQERLQEDTSFGGNLGRAVFQAKKRVLE |
| (Anc80L44) | PLGLVEEGAKTAPGKKRPVEQSPQEPDSSSGIGKKGQQPAKKRLNFGQTGDSESVPDPQPLGEPP |
| | AAPSGVGSNTMASGGGAPMADNNEGADGVGNASGNWHCDSTWLGDRVITTSTRTWALPTYN |
| | NHLYKQISSQSGGSTNDNTYFGYSTPWGYFDFNRFHCHFSPRDWQRLINNNWGFRPKKLNFKLF |
| | NIQVKEVTTNDGTTTIANNLTSTVQVFTDSEYQLPYVLGSAHQGCLPPFPADVFMIPQYGYLTLNN |
| | GSQAVGRSSFYCLEYFPSQMLRTGNNFQFSYTFEDVPFHSSYAHSQSLDRLMNPLIDQYLYYLSRTQ |
| | TTSGTAGNRELQFSQAGPSSMANQAKNWLPGPCYRQQRVSKTTNQNNNSNFAWTGATKYHLN |
| | GRDSLVNPGPAMATHKDDEDKFFPMSGVLIFGKQGAGNSNVDLDNVMITNEEEIKTTNPVATEQ |
| | YGTVATNLQSANTAPATGTVNSQGALPGMVWQDRDVYLQGPIWAKIPHTDGHFHPSPLMGGF |
| | GLKHPPPQILIKNTPVPANPPTTFSPAKFASFITQYSTGQVSVEIEWELQKENSKRWNPEIQYTSNYN |
| | KSTNVDFAVDTNGVYSEPRPIGTRYLTRNL |
| SEQ ID | MAADGYLPDWLEDNLSEGIREWWDLKPGAPKPKANQQKQDDGRGLVLPGYKYLGPFNGLDKGE |
| NO: 148 | PVNAADAAALEHDKAYDQQLKAGDNPYLRYNHADAEFQERLQEDTSFGGNLGRAVFQAKKRVLE |
| (Anc80L59) | PLGLVEEGAKTAPGKKRPVEQSPQEPDSSSGIGKKGQQPAKKRLNFGQTGDSESVPDPQPLGEPP |
| | AAPSGVGSNTMASGGGAPMADNNEGADGVGNASGNWHCDSTWLGDRVITTSTRTWALPTYN |
| | NHLYKQISSQSGASTNDNTYFGYSTPWGYFDFNRFHCHFSPRDWQRLINNNWGFRPKRLNFKLF |
| | NIQVKEVTTNDGTTTIANNLTSTVQVFTDSEYQLPYVLGSAHQGCLPPFPADVFMIPQYGYLTLNN |
| | GSQAVGRSSFYCLEYFPSQMLRTGNNFQFSYTFEDVPFHSSYAHSQSLDRLMNPLIDQYLYYLSRTQ |
| | TTSGTAGNRELQFSQAGPSSMANQAKNWLPGPCYRQQRVSKTTNQNNNSNFAWTGATKYHLN |
| | GRDSLVNPGPAMATHKDDEDKFFPMSGVLIFGKQGAGNSNVDLDNVMITNEEEIKTTNPVATEEY |
| | GTVATNLQSANTAPATGTVNSQGALPGMVWQNRDVYLQGPIWAKIPHTDGHFHPSPLMGGFG |
| | LKHPPPQILIKNTPVPANPPTTFSPAKFASFITQYSTGQVSVEIEWELQKENSKRWNPEIQYTSNYNK |
| | STNVDFAVDTNGVYSEPRPIGTRYLTRNL |
| SEQ ID | MAADGYLPDWLEDNLSEGIREWWDLKPGAPKPKANQQKQDDGRGLVLPGYKYLGPFNGLDKGE |
| NO: 149 | PVNAADAAALEHDKAYDQQLKAGDNPYLRYNHADAEFQERLQEDTSFGGNLGRAVFQAKKRVLE |
| (Anc80L60) | PLGLVEEGAKTAPGKKRPVEQSPQEPDSSSGIGKKGQQPARKRLNFGQTGDSESVPDPQPLGEPP |
| | AAPSGVGSNTMAAGGGAPMADNNEGADGVGNASGNWHCDSTWLGDRVITTSTRTWALPTYN |
| | NHLYKQISSQSGGSTNDNTYFGYSTPWGYFDFNRFHCHFSPRDWQRLINNNWGFRPKRLNFKLF |
| | NIQVKEVTTNDGTTTIANNLTSTVQVFTDSEYQLPYVLGSAHQGCLPPFPADVFMIPQYGYLTLNN |
| | GSQAVGRSSFYCLEYFPSQMLRTGNNFEFSYTFEDVPFHSSYAHSQSLDRLMNPLIDQYLYYLSRTQ |
| | TTSGTAGNRELQFSQAGPSSMANQAKNWLPGPCYRQQRVSKTTNONNNSNFAWTGATKYHLN |
| | GRDSLVNPGPAMATHKDDEDKFFPMSGVLIFGKQGAGNSNVDLDNVMITSEEEIKTTNPVATEEY |
| | GTVATNLQSSNTAPATGTVNSQGALPGMVWQERDVYLQGPIWAKIPHTDGHFHPSPLMGGFGL |
| | KHPPPQILIKNTPVPANPPTTFSPAKFASFITQYSTGQVSVEIEWELQKENSKRWNPEIQYTSNYNKS |
| | TNVDFAVDTNGVYSEPRPIGTRYLTRNL |
| SEQ ID | MAADGYLPDWLEDNLSEGIREWWDLKPGAPKPKANQQKQDDGRGLVLPGYKYLGPFNGLDKGE |
| NO: 150 | PVNAADAAALEHDKAYDQQLKAGDNPYLRYNHADAEFQERLQEDTSFGGNLGRAVFQAKKRVLE |
| (Anc80L62) | PLGLVEEGAKTAPGKKRPVEQSPQEPDSSSGIGKKGQQPARKRLNFGQTGDSESVPDPQPLGEPP |
| | AAPSGVGSNTMASGGGAPMADNNEGADGVGNASGNWHCDSTWLGDRVITTSTRTWALPTYN |
| | NHLYKQISSQSGGSTNDNTYFGYSTPWGYFDFNRFHCHFSPRDWQRLINNNWGFRPKKLNFKLF |
| | NIQVKEVTTNDGTTTIANNLTSTVQVFTDSEYQLPYVLGSAHQGCLPPFPADVFMIPQYGYLTLNN |
| | GSQAVGRSSFYCLEYFPSQMLRTGNNFEFSYTFEDVPFHSSYAHSQSLDRLMNPLIDQYLYYLSRTQ |
| | TTSGTAGNRELQFSQAGPSSMANQAKNWLPGPCYRQQRVSKTTNQNNNSNFAWTGATKYHLN |
| | GRDSLVNPGPAMATHKDDEDKFFPMSGVLIFGKQGAGNSNVDLDNVMITSEEEIKTTNPVATEEY |
| | GTVATNLQSANTAPATGTVNSQGALPGMVWQDRDVYLQGPIWAKIPHTDGHFHPSPLMGGFG |
| | LKHPPPQILIKNTPVPANPPTTFSPAKFASFITQYSTGQVSVEIEWELQKENSKRWNPEIQYTSNYNK |
| | STNVDFAVDTNGVYSEPRPIGTRYLTRNL |
| SEQ ID | MAADGYLPDWLEDNLSEGIREWWDLKPGAPKPKANQQKQDDGRGLVLPGYKYLGPFNGLDKGE |
| NO: 151 | PVNAADAAALEHDKAYDQQLKAGDNPYLRYNHADAEFQERLQEDTSFGGNLGRAVFQAKKRVLE |
| (Anc82DI) | PLGLVEEGAKTAPGKKRPVEQSPQREPDSSTGIGKSGQQPAKKRLNFGQTGDSESVPDPQPLGEPP |
| | AAPSGVGSNTMASGGGAPMADNNEGADGVGNSSGNWHCDSTWLGDRVITTSTRTWALPTYN |
| | NHLYKQISNGTSGGSTNDNTYFGYSTPWGYFDFNRFHCHFSPRDWQRLINNNWGFRPKRLNFKL |
| | FNIQVKEVTTNEGTKTIANNLTSTVQVFTDSEYQLPYVLGSAHQGCLPPFPADVFMIPQYGYLTLNN |
| | GSQAVGRSSFYCLEYFPSQMLRTGNNFQFSYTFEDVPFHSSYAHSQSLDRLMNPLIDQYLYYLSRTQ |
| | TTGGTAGTQTLQFSQAGPSSMANQARNWVPGPCYRQQRVSTTTNQNNNSNFAWTGATKYHLN |
| | GRDSLMNPGVAMASHKDDEDRFFPSSGVLIFGKQGAGNDNVDYSNVMITSEEEIKTTNPVATEEY |
| | GVVATNHQSANTQAQTGTVQNQGILPGMVWQNRDVYLQGPIWAKIPHTDGNFHPSPLMGGF |
| | GLKHPPPQILIKNTPVPADPPTTFNQAKLNSFITQYSTGQVSVEIEWELQKENSKRWNPEIQYTSNY |
| | YKSTNVDFAVNTEGVYSEPRPIGTRYLTRNL |
| SEQ ID | MAADGYLPDWLEDNLSEGIREWWDLKPGAPKPKANQQKQDNGRGLVLPGYKYLGPFNGLDKGE |
| NO: 152 | PVNAADAAALEHDKAYDQQLQAGDNPYLRYNHADAEFQERLQEDTSFGGNLGRAVFQAKKRVLE |
| (AAVrh.74) | PLGLVESPVKTAPGKKRPVEPSPQRSPDSSTGIGKKGQQPAKKRLNFGQTGDSESVPDPQPIGEPP |
| | AGPSGLGSGTMAAGGGAPMADNNEGADGVGSSSGNWHCDSTWLGDRVITTSTRTWALPTYN |
| | NHLYKQISNGTSGGSTNDNTYFGYSTPWGYFDFNRFHCHFSPRDWQRLINNNWGFRPKRLNFKL |
| | FNIQVKEVTQNEGTKTIANNLTSTIQVFTDSEYQLPYVLGSAHQGCLPPFPADVFMIPQYGYLTLNN |
| | GSQAVGRSSFYCLEYFPSQMLRTGNNFEFSYNFEDVPFHSSYAHSQSLDRLMNPLIDQYLYYLSRTQ |
| | STGGTAGTQQLLFSQAGPNNMSAQAKNWLPGPCYRQQRVSTTLSQNNNSNFAWTGATKYHLN |
| | GRDSLVNPGVAMATHKDDEERFFPSSGVLMFGKQGAGKDNVDYSSVMLTSEEEIKTTNPVATEQ |
| | YGVVADNLQQQNAAPIVGAVNSQGALPGMVWQNRDVYLQGPIWAKIPHTDGNFHPSPLMGGF |
| | GLKHPPPQILIKNTPVPADPPTTFNOAKLASFITQYSTGQVSVEIEWELQKENSKRWNPEIQYTSNY |
| | YKSTNVDFAVNTEGTYSEPRPIGTRYLTRNL |
| SEQ ID | RGDLRVS |
| NO: 153 | |
| SEQ ID | RGDAVGV |
| NO: 154 | |
| SEQ ID | RGDFTPTS |
| NO: 155 | |
| SEQ ID | RGDLGLS |
| NO: 156 | |
| SEQ ID | RGDMSRE |
| NO: 157 | |
| SEQ ID | MAADGYLPDWLEDNLSEGIREWWALKPGAPQPKANQQHQDNARGLVLPGYKYLGPGNGLDKG |
| NO: 158 | EPVNAADAAALEHDKAYDQQLKAGDNPYLKYNHADAEFQERLKEDTSFGGNLGRAVFQAKKRLLE |
| (AAV9- | PLGLVEEAAKTAPGKKRPVEQSPQEPDSSAGIGKSGAQPAKKRLNFGQTGDTESVPDPQPIGEPPA |
| deco1) | APSGVGSLTMASGGGAPVADNNEGADGVGSSSGNWHCDSQWLGDRVITTSTRTWALPTYNNH |
| | LYKQISNSTSGGSSNDNAYFGYSTPWGYFDFNRFHCHFSPRDWQRLINNNWGFRPKRLNFKLFNI |
| | QVKEVTDNNGVKTIANNLTSTVQVFTDSDYQLPYVLGSÅHEGCLPPFPADVFMIPQYGYLTLNDGS |
| | QAVGRSSFYCLEYFPSQMLRTGNNFQFSYEFENVPFHSSYAHSQSLDRLMNPLIDQYLYYLSKTING |
| | SGQNQQTLKFSVAGPSNMAVQGRNYIPGPSYRQQRVSTTVTQNNNSEFAWPGASSWALNGRN |
| | SLMNPGPAMASHKEGEDRFFPLSGSLIFGKQGTGRDNVDADKVMITNEEEIKTTNPVATESYGQV |
| | ATNHQSAQRGDLLLSAQAQTGWVQNQGILPGMVWQDRDVYLQGPIWAKIPHTDGNFHPSPLM |
| | GGFGMKHPPPQILIKNTPVPADPPTAFNKDKLNSFITQYSTGQVSVEIEWELQKENSKRWNPEIQY |
| | TSNYYKSNNVEFAVNTEGVYSEPRPIGTRYLTRNL |
| SEQ ID | MAADGYLPDWLEDNLSEGIREWWALKPGAPQPKANQQHQDNARGLVLPGYKYLGPGNGLDKG |
| NO: 159 | EPVNAADAAALEHDKAYDQQLKAGDNPYLKYNHADAEFQERLKEDTSFGGNLGRAVFQAKKRLLE |
| (AAV9- | PLGLVEEAAKTAPGKKRPVEQSPQEPDSSAGIGKSGAQPAKKRLNFGQTGDTESVPDPQPIGEPPA |
| deco1- | APSGVGSLTMASGGGAPVADNNEGADGVGSSSGNWHCDSQWLGDRVITTSTRTWALPTYNNH |
| mut1) | LYKQISNSTSGASTNDNAYFGYSTPWGYFDFNRFHCHFSPRDWQRLINNNWGFRPKRLNFKLFNI |
| | QVKEVTDNNGVKTIANNLTSTVQVFTDSDYQLPYVLGSAHEGCLPPFPADVFMIPQYGYLTLNDGS |
| | QAVGRSSFYCLEYFPSQMLRTGNNFQFSYEFENVPFHSSYAHSQSLDRLMNPLIDQYLYYLSKTING |
| | SGQNQQTLKFSVAGPSNMAVQGRNYIPGPSYRQQRVSTTVTQNNNSEFAWPGASSWALNGRN |
| | SLMNPGPAMASHKEGEDRFFPLSGSLIFGKQGTGRDNVDADKVMITNEEEIKTTNPVATESYGQV |
| | ATNHQSAQRGDLLLSAQAQTGWVQNQGILPGMVWQDRDVYLQGPIWAKIPHTDGNFHPSPLM |
| | GGFGMKHPPPQILIKNTPVPADPPTAFNKDKLNSFITQYSTGQVSVEIEWELQKENSKRWNPEIQY |
| | TSNYYKSNNVEFAVNTEGVYSEPRPIGTRYLTRNL |
| SEQ ID | SEQ ID NO: |
| NO: 160 | |
| SEQ ID | NSTSGGST |
| NO: 161 | |
| SEQ ID | NSTSGAST |
| NO: 162 | |
| SEQ ID | MAADGYLPDWLEDNLSEGIREWWALKPGAPQPKANQQHQDNARGLVLPGYKYLGPGNGLDKG |
| NO: 163 | EPVNAADAAALEHDKAYDQQLKAGDNPYLKYNHADAEFQERLKEDTSFGGNLGRAVFQAKKRLLE |
| (AAV9- | PLGLVEEAAKTAPGKKRPVEQSPQEPDSSAGIGKSGAQPAKKRLNFGQTGDTESVPDPQPIGEPPA |
| mut1) | APSGVGSLTMASGGGAPVADNNEGADGVGSSSGNWHCDSQWLGDRVITTSTRTWALPTYNNH |
| | LYKQISNSTSGASTNDNAYFGYSTPWGYFDFNRFHCHFSPRDWQRLINNNWGFRPKRLNFKLFNI |
| | QVKEVTDNNGVKTIANNLTSTVQVFTDSDYQLPYVLGSAHEGCLPPFPADVFMIPQYGYLTLNDGS |
| | QAVGRSSFYCLEYFPSQMLRTGNNFQFSYEFENVPFHSSYAHSQSLDRLMNPLIDQYLYYLSKTING |
| | SGQNQQTLKFSVAGPSNMAVQGRNYIPGPSYRQQRVSTTVTQNNNSEFAWPGASSWALNGRN |
| | SLMNPGPAMASHKEGEDRFFPLSGSLIFGKQGTGRDNVDADKVMITNEEEIKTTNPVATESYGQV |
| | ATNHQSAQAQAQTGWVQNQGILPGMVWQDRDVYLQGPIWAKIPHTDGNFHPSPLMGGFGM |
| | KHPPPQILIKNTPVPADPPTAFNKDKLNSFITQYSTGQVSVEIEWELQKENSKRWNPEIQYTSNYYK |
| | SNNVEFAVNTEGVYSEPRPIGTRYLTRNL |
| SEQ ID | RDLTEAVPRLPGETLITDKEVIYICPFNGPIKGRVYITNYRLYLRSLETDSSLILDVPLGVISRIEKMGGA |
| NO: 164 | TSRGENSYGLDITCKDMRNLRFALKQEGHSRRDMFEILTRYAFPLAHSLPLFAFLNEEKFNVDGWT |
| (A1) | VYNPVEEYRRQGLPNHHWRITFINKCYELCDTYPALLVVPYRASDDDLRRVATFRSRNRIPVLSWIH |
| | PENKTVIVRCSQPLVGMSGKRNKDDEKYLDVIRETNKQISKLTIYDARPSVNAVANKATGGGYESD |
| | DAYHNAELFFLDIHNIHVMRESLKKVKDIVYPNVEESHWLSSLESTHWLEHIKLVLTGAIQVADKVSS |
| | GKSSVLVHCSDGWDRTAQLTSLAMLMLDSFYRSIEGFEILVQKEWISFGHKFASRIGHGDKNHTDA |
| | DRSPIFLQFIDCVWQMSKQFPTAFEFNEQFLIIILDHLYSCRFGTFLFNCESAR |
| SEQ ID | MASASTSKYNSHSLENESIKRTSRDGVNRDLTEAVPRLPGETLITDKEVIYICPFNGPIKGRVYITNYRL |
| NO: 165 | YLRSLETDSSLILDVPLGVISRIEKMGGATSRGENSYGLDITCKDMRNLRFALKQEGHSRRDMFEILT |
| (MTM1 | RYAFPLAHSLPLFAFLNEEKFNVDGWTVYNPVEEYRRQGLPNHHWRITFINKCYELCDTYPALLVVP |
| amino | YRASDDDLRRVATFRSRNRIPVLSWIHPENKTVIVRCSQPLVGMSGKRNKDDEKYLDVIRETNKQIS |
| acid | KLTIYDARPSVNAVANKATGGGYESDDAYHNAELFFLDIHNIHVMRESLKKVKDIVYPNVEESHWL |
| sequence: | SSLESTHWLEHIKLVLTGAIQVADKVSSGKSSVLVHCSDGWDRTAQLTSLAMLMLDSFYRSIEGFEIL |
| A2) | VQKEWISFGHKFASRIGHGDKNHTDADRSPIFLQFIDCVWQMSKQFPTAFEFNEQFLIIILDHLYSC |
| | RFGTFLFNCESARERQKVTERTVSLWSLINSNKEKFKNPFYTKEINRVLYPVASMRHLELWVNYYIR |
| | WNPRIKQQQPNPVEQRYMELLALRDEYIKRLEELQLANSAKLSDPPTSPSSPSQMMPHVQTHF |
| SEQ ID | atggcttctgcatcaacttctaaatataattcacactccttggagaatgagtctattaagaggacgtctcgagatggagtcaat |
| NO: 166 | cgagatctcactgaggctgttcctcgacttccaggagaaacactaatcactgacaaagaagttatttacatatgtcctttcaat |
| (A3: MTM1 | ggccccattaagggaagagtttacatcacaaattatcgtctttatttaagaagtttggaaacggattcttctctaatacttgatg |
| coding | ttcctctgggtgtgatctcgagaattgaaaaaatgggaggcgcgacaagtagaggagaaaattcctatggtctagatattac |
| seq) | ttgtaaagacatgagaaacctgaggttcgctttgaaacaggaaggccacagcagaagagatatgtttgagatcctcacgag |
| | atacgcgtttcccctggctcacagtctgccattatttgcatttttaaatgaagaaaagtttaacgtggatggatggacagtttac |
| | aatccagtggaagaatacaggaggcagggcttgcccaatcaccattggagaataacttttattaataagtgctatgagctct |
| | gtgacacttaccctgctcttttggtggttccgtatcgtgcctcagatgatgacctccggagagttgcaacttttaggtcccgaaa |
| | tcgaattccagtgctgtcatggattcatccagaaaataagacggtcattgtgcgttgcagtcagcctcttgtcggtatgagtgg |
| | gaaacgaaataaagatgatgagaaatatctcgatgttatcagggagactaataaacaaatttctaaactcaccatttatgat |
| | gcaagacccagcgtaaatgcagtggccaacaaggcaacaggaggaggatatgaaagtgatgatgcatatcataacgccga |
| | acttttcttcttagacattcataatattcatgttatgcgggaatctttaaaaaaagtgaaggacattgtttatoctaatgtagaa |
| | gaatctcattggttgtccagtttggagtctactcattggttagaacatatcaagctcgttttgacaggagccattcaagtagca |
| | gacaaagtttcttcagggaagagttcagtgcttgtgcattgcagtgacggatgggacaggactgctcagctgacatccttggc |
| | catgctgatgttggatagcttctataggagcattgaagggttcgaaatactggtacaaaaagaatggataagttttggacata |
| | aatttgcatctcgaataggtcatggtgataaaaaccacaccgatgctgaccgttctcctatttttctccagtttattgattgtgtg |
| | tggcaaatgtcaaaacagttccctacagcttttgaattcaatgaacaatttttgattataattttggatcatctgtatagttgcc |
| | gatttggtactttcttattcaactgtgaatctgctcgagaaagacagaaggttacagaaaggactgtttctttatggtcactgat |
| | aaacagtaataaagaaaaattcaaaaaccccttctatactaaagaaatcaatcgagttttatatccagttgccagtatgcgtc |
| | acttggaactctgggtgaattactacattagatggaaccccaggatcaagcaacaacagccgaatccagtggagcagcgtt |
| | acatggagctcttagccttacgcgacgaatacataaagcggcttgaggaactgcagctcgccaactctgccaagctttctgat |
| | cccccaacttcaccttccagtccttcgcaaatgatgccccatgtgcaaactcacttttaa |
| SEQ ID | TTAAAAGTGGGTCTGGACGTGGGGCATCATCTGTGAGGGGCTGCTTGGTGAAGTAGGTGGGT |
| NO: 167 | CGGACAGCTTGGCGCTATTGGCCAGCTGCAGCTCCTCCAGCCTCTTGATATACTCATCTCTCAG |
| (A4) | GGCCAGCAGCTCCATGTACCGCTGCTCCACAGGGTTGGGCTGCTGCTGCTTGATCCGGGGATT |
| (Genscript | CCAGCGGATATAGTAGTTCACCCACAGCTCCAGGTGTCTCATGGATGCCACAGGATACAGCAC |
| codon | GCGATTGATCTCCTTTGTGTAGAAGGGGTTCTTGAACTTCTCCTTATTGCTGTTGATCAGGCTCC |
| optimized | ACAGAGACACTGTGCGCTCGGTCACCTTCTGCCTCTCTCTGGCAGACTCACAATTAAACAGGAA |
| MTM1) | TGTGCCGAACCTGCAGGAGTACAGGTGGTCCAGGATGATGATCAGAAACTGCTCGTTAAACTC |
| | GAAGGCGGTTGGGAACTGCTTGGACATCTGCCACACGCAGTCGATAAACTGCAGGAAGATAG |
| | GGCTGCGGTCGGCATCGGTGTGATTCTTATCGCCGTGGCCGATCCTGGAGGCAAACTTGTGGC |
| | CGAAGCTGATCCACTCCTTCTGCACCAGGATCTCAAAGCCCTCGATAGATCTATAGAAGGAGTC |
| | CAGCATCAGCATaGCCAGGCTTGTCAGCTGTGCTGTTCTGTCCCACCCATCGGAACAGTGCACC |
| | AGCACGGAGCTCTTGCCAGAGGACACCTTATCGGCCACCTGGATGGCGCCTGTCAGCACCAGC |
| | TTGATGTGCTCCAGCCAGTGGGTAGACTCCAGGCTAGACAGCCAGTGGGACTCCTCCACGTTT |
| | GGGTACACGATGTCCTTCACCTTCTTCAGGGACTCTCTCATCACGTGGATATTGTGGATATCCA |
| | GAAAGAACAGCTCGGCGTTGTGATAGGCGTCATCAGACTCATATCCTCCTCCTGTTGCCTTATT |
| | TGCCACTGCATTCACAGAAGGCCGGGCATCATAGATTGTCAGCTTGCTGATCTGCTTATTTGTC |
| | TCTCTGATCACATCCAGGTACTTCTCGTCATCCTTGTTCCGCTTGCCAGACATTCCCACCAGTGG |
| | CTGGGAGCAGCGCACGATCACTGTCTTATTCTCTGGGTGGATCCAGCTCAGCACAGGGATTCT |
| | GTTCCGGCTCCGGAAGGTGGCCACTCTCCGCAGGTCATCGTCGCTGGCTCTGTAGGGCACCAC |
| | CAGCAGGGCTGGATATGTATCGCACAGCTCGTAGCACTTATTGATAAAGGTGATCCGCCAGTG |
| | GTGGTTAGGCAGGCCCTGGCGCCTATACTCCTCCACGGGGTTGTACACTGTCCAGCCGTCCAC |
| | ATTGAACTTCTCCTCGTTCAGAAAGGCGAACAGAGGCAGAGAGTGGGCCAGGGGAAAGGCAT |
| | ATCTGGTCAGGATCTCGAACATATCTCTCCGGGAGTGGCCCTCCTGCTTCAGGGCAAACCGCA |
| | GATTGCGCATGTCCTTACAGGTGATATCCAGGCCGTAGCTGTTCTCTCCCCTAGAGGTGGCTCC |
| | TCCCATCTTCTCGATTCTGCTGATCACGCCCAGAGGCACGTCCAGGATCAGGGAGCTATCTGTC |
| | TCCAGGCTCCGCAGGTACAGTCTGTAATTGGTGATATACACGCGGCCCTTGATTGGGCCGTTG |
| | AAAGGGCAGATGTAGATCACTTCCTTGTCTGTGATCAGTGTCTCTCCAGGCAGCCTTGGCACTG |
| | CCTCTGTCAGATCTCTATTGACCCCGTCCCTTGAGGTTCTCTTGATGCTCTCGTTTTCCAGGCTAT |
| | GTGAGTTGTATTTGCTTGTGCTTGCTGATGCCAT |
| SEQ ID | ATGGCTTCTGCATCAACTTCTAAATATAATTCACACTCCTTGGAGAATGAGTCTATTAAGAGGA |
| NO: 168 | CGTCTCGAGATGGAGTCAATCGAGATCTCACTGAGGCTGTTCCTCGACTTCCAGGAGAAACAC |
| (A5) | TAATCACTGACAAAGAAGTTATTTACATATGTCCTTTCAATGGCCCCATTAAGGGAAGAGTTTA |
| (Eurofins | CATCACAAATTATCGTCTTTATTTAAGAAGTTTGGAAACGGATTCTTCTCTAATACTTGATGTTC |
| codon | CTCTGGGTGTGATCTCGAGAATTGAAAAAATGGGAGGCGCGACAAGTAGAGGAGAAAATTCC |
| optimized | TATGGTCTAGATATTACTTGTAAAGACATGAGAAACCTGAGGTTCGCTTTGAAACAGGAAGGC |
| MTM1) | CACAGCAGAAGAGATATGTTTGAGATCCTCACGAGATACGCGTTTCCCCTGGCTCACAGTCTGC |
| | CATTATTTGCATTTTTAAATGAAGAAAAGTTTAACGTGGATGGATGGACAGTTTACAATCCAGT |
| | GGAAGAATACAGGAGGCAGGGCTTGCCCAATCACCATTGGAGAATAACTTTTATTAATAAGTG |
| | CTATGAGCTCTGTGACACTTACCCTGCTCTTTTGGTGGTTCCGTATCGTGCCTCAGATGATGACC |
| | TCCGGAGAGTTGCAACTTTTAGGTCCCGAAATCGAATTCCAGTGCTGTCATGGATTCATCCAGA |
| | AAATAAGACGGTCATTGTGCGTTGCAGTCAGCCTCTTGTCGGTATGAGTGGGAAACGAAATAA |
| | AGATGATGAGAAATATCTCGATGTTATCAGGGAGACTAATAAACAAATTTCTAAACTCACCATT |
| | TATGATGCAAGACCCAGCGTAAATGCAGTGGCCAACAAGGCAACAGGAGGAGGATATGAAAG |
| | TGATGATGCATATCATAACGCCGAACTTTTCTTCTTAGACATTCATAATATTCATGTTATGCGGG |
| | AATCTTTAAAAAAAGTGAAGGACATTGTTTATCCTAATGTAGAAGAATCTCATTGGTTGTCCAG |
| | TTTGGAGTCTACTCATTGGTTAGAACATATCAAGCTCGTTTTGACAGGAGCCATTCAAGTAGCA |
| | GACAAAGTTTCTTCAGGGAAGAGTTCAGTGCTTGTGCATTGCAGTGACGGATGGGACAGGACT |
| | GCTCAGCTGACATCCTTGGCCATGCTGATGTTGGATAGCTTCTATAGGAGCATTGAAGGGTTC |
| | GAAATACTGGTACAAAAAGAATGGATAAGTTTTGGACATAAATTTGCATCTCGAATAGGTCAT |
| | GGTGATAAAAACCACACCGATGCTGACCGTTCTCCTATTTTTCTCCAGTTTATTGATTGTGTGTG |
| | GCAAATGTCAAAACAGTTCCCTACAGCTTTTGAATTCAATGAACAATTTTTGATTATAATTTTGG |
| | ATCATCTGTATAGTTGCCGATTTGGTACTTTCTTATTCAACTGTGAATCTGCTCGAGAAAGACAG |
| | AAGGTTACAGAAAGGACTGTTTCTTTATGGTCACTGATAAACAGTAATAAAGAAAAATTCAAA |
| | AACCCATTCTATACTAAAGAAATCAATAGAGTTTTATATCCAGTTGCAAGTATGCGTCACTTGG |
| | AACTCTGGGTGAATTACTACATTAGATGGAACCCCAGGATCAAACAACAACAACCAAATCCAG |
| | TGGAACAACGTTACATGGAACTCTTAGCCTTACGAGATGAATACATAAAACGGCTTGAGGAAC |
| | TGCAACTAGCAAACTCTGCAAAACTTTCTGATCCCCCAACTTCACCTTCCAGTCCTTCTCAAATG |
| | ATGCCACATGTGCAAACTCACTTTTAA |
| SEQ ID | ATGGCCTCTGCCAGCACCTCTAAGTACAACAGCCACTCCCTGGAAAATGAATCCATCAAAAGG |
| NO: 169 | ACCAGCAGAGATGGAGTGAACAGAGACCTAACTGAAGCTGTGCCAAGACTGCCTGGAGAGAC |
| (A6) | CCTGATCACAGACAAGGAAGTGATCTACATCTGCCCCTTCAATGGCCCTATCAAGGGAAGGGT |
| (delCpG | GTACATCACCAACTACAGGCTTTACCTGAGATCCCTGGAGACAGACAGCAGCCTGATCCTGGA |
| Genscript | TGTGCCTCTGGGAGTGATCAGCAGAATAGAGAAGATGGGGGGTGCCACCAGCAGAGGAGAG |
| codon | AACAGCTATGGCCTGGACATCACCTGCAAGGACATGAGAAACCTGAGATTTGCCCTGAAGCAG |
| optimized | GAGGGCCACAGCAGAAGAGACATGTTTGAAATCCTGACCAGGTATGCCTTCCCCCTGGCCCAC |
| MTM1) | TCTCTCCCCCTGTTTGCCTTCCTGAATGAGGAAAAGTTCAATGTTGATGGCTGGACAGTGTACA |
| | ACCCAGTGGAGGAGTACAGAAGACAGGGCCTGCCTAACCACCACTGGAGGATCACCTTCATCA |
| | ACAAGTGCTATGAACTGTGTGACACATACCCTGCCCTGCTGGTGGTGCCTTACAGAGCCTCAGA |
| | TGATGACCTGAGAAGAGTTGCCACCTTCAGAAGCAGGAACAGAATCCCTGTACTGAGCTGGAT |
| | CCACCCTGAGAATAAGACTGTGATTGTGAGGTGCAGCCAGCCCCTGGTGGGCATGAGTGGCA |
| | AGAGAAACAAAGATGATGAAAAGTACCTGGATGTGATCAGAGAGACCAACAAACAGATCAGC |
| | AAGCTCACCATCTATGATGCTAGACCCTCTGTTAATGCTGTGGCCAACAAGGCCACAGGGGGA |
| | GGCTATGAATCTGATGATGCTTACCACAATGCTGAGCTGTTCTTCCTGGACATCCACAACATCC |
| | ATGTGATGAGAGAATCCCTCAAGAAAGTGAAGGACATTGTGTACCCTAATGTGGAAGAAAGTC |
| | ACTGGCTGAGCAGCTTGGAGTCCACCCACTGGCTGGAGCACATCAAGCTGGTCCTGACAGGAG |
| | CCATCCAGGTGGCTGACAAGGTGAGTTCTGGCAAGTCCTCAGTGCTGGTCCACTGCTCTGATG |
| | GCTGGGACAGAACTGCCCAGCTGACCAGTCTGGCCATGCTGATGCTGGACTCCTTCTACAGAA |
| | GCATTGAAGGCTTTGAAATCCTGGTGCAAAAGGAATGGATCTCTTTTGGCCACAAGTTTGCCA |
| | GCAGAATTGGCCATGGTGACAAAAACCACACAGATGCTGACAGAAGCCCTATCTTCCTGCAGT |
| | TCATTGACTGTGTGTGGCAGATGAGCAAGCAGTTCCCCACAGCATTTGAGTTCAATGAGCAGT |
| | TCCTAATAATCATCCTGGACCACCTCTACAGCTGCAGATTTGGCACCTTCCTGTTCAACTGTGAG |
| | TCTGCCAGAGAAAGACAGAAGGTGACAGAGAGGACAGTGAGCCTGTGGAGCCTGATCAACTC |
| | CAACAAGGAGAAGTTCAAGAACCCCTTCTACACCAAGGAAATCAACAGGGTGCTGTACCCTGT |
| | GGCTAGCATGAGGCACCTGGAGCTGTGGGTCAACTACTACATCAGATGGAACCCTAGAATCAA |
| | ACAGCAACAACCCAACCCTGTGGAGCAGAGGTACATGGAGTTACTGGCCCTGAGGGATGAGT |
| | ACATCAAGAGACTGGAGGAGCTGCAGCTGGCCAACTCTGCCAAACTGTCTGACCCTCCTACCTC |
| | CCCCAGCTCCCCCTCTCAGATGATGCCACATGTGCAGACCCACTTTTAA |
| SEQ ID | TTAAAAGTGGGTCTGCACGTGAGGCATCATCTGGCTGGGGCTGCTAGGGCTTGTAGGAGGAT |
| NO 170 | CGCTCAGCTTGGCGCTGTTGGCCAGCTGCAGTTCTTCCAGTCTCTTGATGTACTCGTCCCGCAG |
| (A7) | GGCCAGCAGTTCCATGTACCGCTGTTCCACAGGATTGGGCTGCTGCTGCTTGATTCTGGGGTTC |
| (GeneArt | CACCGGATGTAGTAGTTGACCCACAGTTCCAGATGTCTCATGCTGGCCACGGGGTACAGCACC |
| codon | CGGTTGATTTCTTTGGTGTAGAAGGGGTTCTTGAATTTCTCTTTGTTGCTGTTGATCAGGGACC |
| optimized | ACAGAGACACGGTCCGCTCGGTCACTTTCTGCCGTTCTCTGGCGCTCTCGCAGTTGAACAGGAA |
| MTM1) | GGTGCCGAATCTGCAGCTGTACAGGTGGTCCAGGATGATGATCAGGAACTGCTCGTTGAACTC |
| | GAAGGCGGTAGGGAACTGCTTGGACATCTGCCACACGCAGTCGATGAACTGCAGGAAGATGG |
| | GGCTTCTATCGGCGTCGGTGTGGTTCTTGTCGCCGTGTCCGATTCTGCTGGCGAACTTGTGGCC |
| | GAAGCTGATCCACTCTTTCTGCACCAGGATCTCAAAGCCCTCGATGGATCTGTAGAAGCTGTCC |
| | AGCATCAGCATGGCCAGAGATGTCAGCTGGGCTGTTCTATCCCAGCCGTCGCTACAGTGCACC |
| | AGCACGCTAGACTTGCCAGAGGACACCTTATCGGCCACCTGGATGGCGCCTGTCAGCACCAGC |
| | TTGATGTGTTCCAGCCAGTGTGTGCTTTCCAGACTGCTCAGCCAGTGGCTCTCTTCCACATTGG |
| | GGTACACGATGTCCTTCACTTTCTTCAGGCTTTCCCGCATCACGTGGATGTTGTGGATGTCCAG |
| | AAAGAACAGCTCGGCGTTATGATAGGCGTCGTCGCTCTCGTATCCGCCGCCTGTAGCTTTGTTG |
| | GCCACGGCGTTCACGCTAGGTCTGGCGTCGTAGATGGTCAGCTTGCTGATCTGCTTGTTTGTCT |
| | CGCGGATCACGTCCAGGTACTTCTCGTCGTCCTTGTTTCTCTTGCCAGACATGCCCACGAGGGG |
| | CTGAGAACACCGCACGATCACGGTCTTGTTCTCGGGGTGAATCCAGCTCAGCACAGGGATTCT |
| | GTTCCGGCTCCGAAAGGTGGCCACTCTTCTCAGGTCGTCGTCGGAGGCTCTGTAAGGCACCAC |
| | CAGCAGTGCGGGGTATGTGTCGCACAGCTCGTAGCACTTGTTGATGAAGGTGATCCGCCAGTG |
| | GTGATTAGGCAGGCCCTGTCTCCGATACTCTTCCACGGGGTTGTACACGGTCCAGCCGTCCACG |
| | TTGAACTTCTCTTCGTTCAGGAAGGCGAACAGAGGCAGGGAGTGAGCCAGAGGAAAGGCGTA |
| | TCTGGTCAGGATCTCGAACATGTCCCGTCTGCTGTGGCCCTCTTGCTTCAGGGCGAATCTCAGG |
| | TTCCGCATGTCCTTGCATGTGATGTCCAGGCCGTAGCTATTCTCGCCTCTGGAGGTGGCTCCGC |
| | CCATTTTCTCAATCCGGCTGATCACGCCCAGGGGCACATCCAGGATCAGGCTGCTATCGGTTTC |
| | CAGGGACCGCAGGTACAGCCGGTAGTTGGTGATGTACACGCGGCCCTTGATGGGGCCGTTGA |
| | AGGGGCAGATGTAGATCACTTCTTTGTCGGTGATCAGTGTCTCGCCAGGCAGTCTAGGCACGG |
| | CCTCTGTCAGATCCCTGTTCACGCCATCTCTGCTGGTCCGCTTGATGCTCTCGTTTTCCAGGCTG |
| | TGGCTGTTGTACTTGCTTGTGCTGGCGCTAGCCAT |
| SEQ ID | gacattgattattgactagttattaatagtaatcaattacggggtcattagttcatagcccatatatggagttccgcgttacata |
| NO: 171 | acttacggtaaatggcccgcctggctgaccgcccaacgacccccgcccattgacgtcaataatgacgtatgttcccatagtaa |
| (B1) | cgccaatagggactttccattgacgtcaatgggtggagtatttacggtaaactgcccacttggcagtacatcaagtgtatcat |
| (CMV-IE | atgccaagtacgccccctattgacgtcaatgacggtaaatggcccgcctggcattatgcccagtacatgaccttatgggactt |
| sequence) | tcctacttggcagtacatctacgtattagtcatcgctattaccatggt |
| SEQ ID | Tcgaggtgagccccacgttctgcttcactctccccatctcccccccctccccacccccaattttgtatttatttattttttaattatt |
| NO: 172 | ttgtgcagcgatgggggcggggggggggggggggcgcgcgccaggcggggggggcggggcgaggggggggcggggc |
| (B2) | gaggcggagaggtgcggcggcagccaatcagagcggcgcgctccgaaagtttccttttatggcgaggcggcggcggcggc |
| (chicken | ggccctataaaaagcgaagcgcgcggcgggcg |
| beta | |
| actin | |
| promoter) | |
| SEQ | Gacattgattattgactagttattaatagtaatcaattacggggtcattagttcatagcccatatatggagttccgcgttacat |
| ID NO: | aacttacggtaaatggcccgcctggctgaccgcccaacgacccccgcccattgacgtcaataatgacgtatgttcccatagta |
| 173 | acgccaatagggactttccattgacgtcaatgggtggagtatttacggtaaactgcccacttggcagtacatcaagtgtatca |
| (B3) | tatgccaagtacgccccctattgacgtcaatgacggtaaatggcccgcctggcattatgcccagtacatgaccttatgggact |
| (CMV-IE | ttcctacttggcagtacatctacgtattagtcatcgctattaccatggttcgaggtgagccccacgttctgcttcactctccccat |
| plus | ctcccccccctccccacccccaattttgtatttatttattttttaattattttgtgcagcgatgggggcgggggggggggggggg |
| chicken | cgcgcgccaggcggggggggcggggcgaggggcggggcggggcgaggcggagaggtgcggcggcagccaatcagagc |
| beta | ggcgcgctccgaaagtttccttttatggcgaggcggcggcggcggcggccctataaaaagcgaagcgcgcggcgggcg |
| actin | |
| promoter) | |
| SEQ ID | AAAAAATGCTTTCTTCTTTTAATATACTTTTTTGTTTATCTTATTTCTAATACTTTCCCTAATCTCTT |
| NO: 174 | TCTTTCAGGGCAATAATGATACAATGTATCATGCCTCTTTGCACCATTCTAAAGAATAACAGTG |
| (B4) | ATAATTTCTGGGTTAAGGCAATAGCAATATTTCTGCATATAAATATTTCTGCATATAAATTGTAA |
| (3′ end | CTGATGTAAGAGGTTTCATATTGCTAATAGCAGCTACAATCCAGCTACCATTCTGCTTTTATTTT |
| of | ATGGTTGGGATAAGGCTGGATTATTCTGAGTCCAAGCTAGGCCCTTTTGCTAATCATGTTCATA |
| human | CCTCTTATCTTCCTCCCACAG |
| beta | |
| globin | |
| intron | |
| 2) | |
| SEQ ID | GTGCATTGGAACGCGGATTCCCCGTGCCAAGAGTGACGTAAGTACCGCCTATAGAGTCTATAG |
| NO: 175 | GCCCAC |
| (B5) | |
| (human | |
| betaherpes | |
| virus | |
| intron) | |
| SEQ ID | GTGCATTGGAACGCGGATTCCCCGTGCCAAGAGTGACGTAAGTACCGCCTATAGAGTCTATAG |
| NO: 176 | GCCCACAAAAAATGCTTTCTTCTTTTAATATACTTTTTTGTTTATCTTATTTCTAATACTTTCCCTA |
| (B6) | ATCTCTTTCTTTCAGGGCAATAATGATACAATGTATCATGCCTCTTTGCACCATTCTAAAGAATA |
| (chimeric | ACAGTGATAATTTCTGGGTTAAGGCAATAGCAATATTTCTGCATATAAATATTTCTGCATATAAA |
| intron) | TTGTAACTGATGTAAGAGGTTTCATATTGCTAATAGCAGCTACAATCCAGCTACCATTCTGCTTT |
| | TATTTTATGGTTGGGATAAGGCTGGATTATTCTGAGTCCAAGCTAGGCCCTTTTGCTAATCATG |
| | TTCATACCTCTTATCTTCCTQCCACAG |
| SEQ ID | GATCTTTTTCCCTCTGCCAAAAATTATGGGGACATCATGAAGCCCCTTGAGCATCTGACTTCTG |
| NO: 177 | GCTAATAAAGGAAATTTATTTTCATTGCAATAGTGTGTTGGAATTTTTTGTGTCTCTCA |
| (D1) | |
| SEQ ID | Ttggccactccctctctgcgcgctcgctcgctcactgaggccgcccgggcaaagcccgggcgtcgggcgacctttggtcgccc |
| NO: 178 | ggcctcagtgagcgagcgagcgcgcagagagggagtggccaactccatcactaggggttcct |
| (D2) | |
| SEQ ID | Aggaacccctagtgatggagttggccactccctctctgcgcgctcgctcgctcactgaggccgggcgaccaaaggtcgcccg |
| NO: 179 | acgcccgggctttgcccgggcggcctcagtgagcgagcgagcgcgcagagagggagtggccaa |
| (D3) | |
| SEQ ID | CTCCTGGGCAACGTGCTGGTCTGTGTGCTGGCCCATCACTTTGGCAAAGAATT |
| NO: 180 | |
| (D4) | |
| SEQ ID | ttggccactccctctctgcgcgctcgctcgctcactgaggccgcccgggcaaagcccgggcgtcgggcgacctttggtcgccc |
| NO: 181 | ggcctcagtgagcgagcgagcgcgcagagagggagtggccaactccatcactaggggttcctTGCGCAcaggtaccccc |
| (E1) | ctgcccccacagctcctctcctgtgccttgtttcccagccatgcgttctcctctataaatacccgctctggtatttggggttggca |
| | gctgttgctgccagggagatggttgggttgacatgcggctcctgacaaaacacaaacccctggtgtgtgtgggcgtgggtggt |
| | gtgagtagggggatgaatcagggagggggcgggggacccagggggcaggagccacacaaagtctgtgcggggggggag |
| | cgcacatagcaattggaaactggctgcagacatgcttgctgcctgccctggcgaaggattggtaggcttgccgtcacaggac |
| | ccccgctggctgactcaggggcgcaggctcttgcgggggagctggcctcccgcccccacggccacgggccctttcctggcag |
| | gacagcgggatcttgcagctgtcaggggaggggaggcgggggctgatgtcaggagggatacaaatagtgccgacggctgg |
| | gggccctgtctcccctcgccgcatccactctccggccggccgcctgcccgccgcctcctccgtgcgcccgccagcctcgcccgc |
| | gccgtcaccGATATCtcagatcgcctggagacgccatccacgctgttttgacctccatagaagacaccgggaccgatcca |
| | gcctccgcggattcgaaTCCCGGCCGGGAACGGTGCATTGGAACGCGGATTCCCCGTGCCAAGAGT |
| | GACGTAAGTACCGCCTATAGAGTCTATAGGCCCACAAAAAATGCTTTCTTCTTTTAATATACTTT |
| | TTTGTTTATCTTATTTCTAATACTTTCCCTAATCTCTTTCTTTCAGGGCAATAATGATACAATGTAT |
| | CATGCCTCTTTGCACCATTCTAAAGAATAACAGTGATAATTTCTGGGTTAAGGCAATAGCAATA |
| | TTTCTGCATATAAATATTTCTGCATATAAATTGTAACTGATGTAAGAGGTTTCATATTGCTAATA |
| | GCAGCTACAATCCAGCTACCATTCTGCTTTTATTTTATGGTTGGGATAAGGCTGGATTATTCTGA |
| | GTCCAAGCTAGGCCCTTTTGCTAATCATGTTCATACCTCTTATCTTCCTCCCACAGCTCCTGGGC |
| | AACGTGCTGGTCTGTGTGCTGGCCCATCACTTTGGCAAAGAATTTGAGCGGCCGCCACCATGG |
| | CATCAGCAAGCACAAGCAAATACAACTCACATAGCCTGGAAAACGAGAGCATCAAGAGAACCT |
| | CAAGGGACGGGGTCAATAGAGATCTGACAGAGGCAGTGCCAAGGCTGCCTGGAGAGACACT |
| | GATCACAGACAAGGAAGTGATCTACATCTGCCCTTTCAACGGCCCAATCAAGGGCCGCGTGTA |
| | TATCACCAATTACAGACTGTACCTGCGGAGCCTGGAGACAGATAGCTCCCTGATCCTGGACGT |
| | GCCTCTGGGCGTGATCAGCAGAATCGAGAAGATGGGAGGAGCCACCTCTAGGGGAGAGAAC |
| | AGCTACGGCCTGGATATCACCTGTAAGGACATGCGCAATCTGCGGTTTGCCCTGAAGCAGGAG |
| | GGCCACTCCCGGAGAGATATGTTCGAGATCCTGACCAGATATGCCTTTCCCCTGGCCCACTCTC |
| | TGCCTCTGTTCGCCTTTCTGAACGAGGAGAAGTTCAATGTGGACGGCTGGACAGTGTACAACC |
| | CCGTGGAGGAGTATAGGCGCCAGGGCCTGCCTAACCACCACTGGCGGATCACCTTTATCAATA |
| | AGTGCTACGAGCTGTGCGATACATATCCAGCCCTGCTGGTGGTGCCCTACAGAGCCAGCGACG |
| | ATGACCTGCGGAGAGTGGCCACCTTCCGGAGCCGGAACAGAATCCCTGTGCTGAGCTGGATCC |
| | ACCCAGAGAATAAGACAGTGATCGTGCGCTGCTCCCAGCCACTGGTGGGAATGTCTGGCAAGC |
| | GGAACAAGGATGACGAGAAGTACCTGGATGTGATCAGAGAGACAAATAAGCAGATCAGCAA |
| | GCTGACAATCTATGATGCCCGGCCTTCTGTGAATGCAGTGGCAAATAAGGCAACAGGAGGAG |
| | GATATGAGTCTGATGACGCCTATCACAACGCCGAGCTGTTCTTTCTGGATATCCACAATATCCA |
| | CGTGATGAGAGAGTCCCTGAAGAAGGTGAAGGACATCGTGTACCCAAACGTGGAGGAGTCCC |
| | ACTGGCTGTCTAGCCTGGAGTCTACCCACTGGCTGGAGCACATCAAGCTGGTGCTGACAGGCG |
| | CCATCCAGGTGGCCGATAAGGTGTCCTCTGGCAAGAGCTCCGTGCTGGTGCACTGTTCCGATG |
| | GGTGGGACAGAACAGCACAGCTGACAAGCCTGGCtATGCTGATGCTGGACTCCTTCTATAGAT |
| | CTATCGAGGGCTTTGAGATCCTGGTGCAGAAGGAGTGGATCAGCTTCGGCCACAAGTTTGCCT |
| | CCAGGATCGGCCACGGCGATAAGAATCACACCGATGCCGACCGCAGCCCTATCTTCCTGCAGT |
| | TTATCGACTGCGTGTGGCAGATGTCCAAGCAGTTCCCAACCGCCTTCGAGTTTAACGAGCAGTT |
| | TCTGATCATCATCCTGGACCACCTGTACTCCTGCAGGTTCGGCACATTCCTGTTTAATTGTGAGT |
| | CTGCCAGAGAGAGGCAGAAGGTGACCGAGCGCACAGTGTCTCTGTGGAGCCTGATCAACAGC |
| | AATAAGGAGAAGTTCAAGAACCCCTTCTACACAAAGGAGATCAATCGCGTGCTGTATCCTGTG |
| | GCATCCATGAGACACCTGGAGCTGTGGGTGAACTACTATATCCGCTGGAATCCCCGGATCAAG |
| | CAGCAGCAGCCCAACCCTGTGGAGCAGCGGTACATGGAGCTGCTGGCCCTGAGAGATGAGTA |
| | TATCAAGAGGCTGGAGGAGCTGCAGCTGGCCAATAGCGCCAAGCTGTCCGACCCACCTACTTC |
| | ACCAAGCAGCCCCTCACAGATGATGCCCCACGTCCAGACCCACTTTTAATTAAGATCTTTTTCCC |
| | TCTGCCAAAAATTATGGGGACATCATGAAGCCCCTTGAGCATCTGACTTCTGGCTAATAAAGGA |
| | AATTTATTTTCATTGCAATAGTGTGTTGGAATTTTTTGTGTCTCTCActcgagGCCTaggaacccctagt |
| | gatggagttggccactccctctctgcgcgctcgctcgctcactgaggccgggcgaccaaaggtcgcccgacgcccgggctttg |
| | cccgggcggcctcagtgagcgagcgagcgcgcagagagggagtggccaa |
| SEQ ID | ttggccactccctctctgcgcgctcgctcgctcactgaggccgcccgggcaaagcccgggcgtcgggcgacctttggtcgccc |
| NO: 182 | ggcctcagtgagcgagcgagcgcgcagagagggagtggccaactccatcactaggggttcctTGCGCAcaggtaccgac |
| (E2) | attgattattgactagttattaatagtaatcaattacggggtcattagttcatagcccatatatggagttccgcgttacataact |
| | tacggtaaatggcccgcctggctgaccgcccaacgacccccgcccattgacgtcaataatgacgtatgttcccatagtaacgc |
| | caatagggactttccattgacgtcaatgggtggagtatttacggtaaactgcccacttggcagtacatcaagtgtatcatatgc |
| | caagtacgccccctattgacgtcaatgacggtaaatggcccgcctggcattatgcccagtacatgaccttatgggactttccta |
| | cttggcagtacatctacgtattagtcatcgctattaccatggtcgaggtgagccccacgttctgcttcactctccccatctcccc |
| | cccctccccacccccaattttgtatttatttattttttaattattttgtgcagcgatgggggcggggggggggggggggcgcgcg |
| | ccaggcggggggggcggggcgaggggcggggggggcgaggcggagaggtgcggcggcagccaatcagagcggcgcg |
| | ctccgaaagtttccttttatggcgaggcggcggcggcggcggccctataaaaagcgaagcgcgcggcgggcgGATATCtc |
| | agatcgcctggagacgccatccacgctgttttgacctccatagaagacaccgggaccgatccagcctccgcggattcgaaTC |
| | CCGGCCGGGAACGGTGCATTGGAACGCGGATTCCCCGTGCCAAGAGTGACGTAAGTACCGCC |
| | TATAGAGTCTATAGGCCCACAAAAAATGCTTTCTTCTTTTAATATACTTTTTTGTTTATCTTATTTC |
| | TAATACTTTCCCTAATCTCTTTCTTTCAGGGCAATAATGATACAATGTATCATGCCTCTTTGCACC |
| | ATTCTAAAGAATAACAGTGATAATTTCTGGGTTAAGGCAATAGCAATATTTCTGCATATAAATA |
| | TTTCTGCATATAAATTGTAACTGATGTAAGAGGTTTCATATTGCTAATAGCAGCTACAATCCAGC |
| | TACCATTCTGCTTTTATTTTATGGTTGGGATAAGGCTGGATTATTCTGAGTCCAAGCTAGGCCCT |
| | TTTGCTAATCATGTTCATACCTCTTATCTTCCTCCCACAGCTCCTGGGCAACGTGCTGGTCTGTG |
| | TGCTGGCCCATCACTTTGGCAAAGAATTTGAGCGGCCGCCACCATGGCTAGCGCCAGCACAAG |
| | CAAGTACAACAGCCACAGCCTGGAAAACGAGAGCATCAAGCGGACCAGCAGAGATGGCGTGA |
| | ACAGGGATCTGACAGAGGCCGTGCCTAGACTGCCTGGCGAGACACTGATCACCGACAAAGAA |
| | GTGATCTACATCTGCCCCTTCAACGGCCCCATCAAGGGCCGCGTGTACATCACCAACTACCGGC |
| | TGTACCTGCGGTCCCTGGAAACCGATAGCAGCCTGATCCTGGATGTGCCCCTGGGCGTGATCA |
| | GCCGGATTGAGAAAATGGGCGGAGCCACCTCCAGAGGCGAGAATAGCTACGGCCTGGACATC |
| | ACATGCAAGGACATGCGGAACCTGAGATTCGCCCTGAAGCAAGAGGGCCACAGCAGACGGGA |
| | CATGTTCGAGATCCTGACCAGATACGCCTTTCCTCTGGCTCACTCCCTGCCTCTGTTCGCCTTCCT |
| | GAACGAAGAGAAGTTCAACGTGGACGGCTGGACCGTGTACAACCCCGTGGAAGAGTATCGGA |
| | GACAGGGCCTGCCTAATCACCACTGGCGGATCACCTTCATCAACAAGTGCTACGAGCTGTGCG |
| | ACACATACCCCGCACTGCTGGTGGTGCCTTACAGAGCCTCCGACGACGACCTGAGAAGAGTGG |
| | CCACCTTTCGGAGCCGGAACAGAATCCCTGTGCTGAGCTGGATTCACCCCGAGAACAAGACCG |
| | TGATCGTGCGGTGTTCTCAGCCCCTCGTGGGCATGTCTGGCAAGAGAAACAAGGACGACGAG |
| | AAGTACCTGGACGTGATCCGCGAGACAAACAAGCAGATCAGCAAGCTGACCATCTACGACGCC |
| | AGACCTAGCGTGAACGCCGTGGCCAACAAAGCTACAGGCGGCGGATACGAGAGCGACGACG |
| | CCTATCATAACGCCGAGCTGTTCTTTCTGGACATCCACAACATCCACGTGATGCGGGAAAGCCT |
| | GAAGAAAGTGAAGGACATCGTGTACCCCAATGTGGAAGAGAGCCACTGGCTGAGCAGTCTGG |
| | AAAGCACACACTGGCTGGAACACATCAAGCTGGTGCTGACAGGCGCCATCCAGGTGGCCGAT |
| | AAGGTGTCCTCTGGCAAGTCTAGCGTGCTGGTGCACTGTAGCGACGGCTGGGATAGAACAGC |
| | CCAGCTGACATCTCTGGCCATGCTGATGCTGGACAGCTTCTACAGATCCATCGAGGGCTTTGAG |
| | ATCCTGGTGCAGAAAGAGTGGATCAGCTTCGGCCACAAGTTCGCCAGCAGAATCGGACACGG |
| | CGACAAGAACCACACCGACGCCGATAGAAGCCCCATCTTCCTGCAGTTCATCGACTGCGTGTG |
| | GCAGATGTCCAAGCAGTTCCCTACCGCCTTCGAGTTCAACGAGCAGTTCCTGATCATCATCCTG |
| | GACCACCTGTACAGCTGCAGATTCGGCACCTTCCTGTTCAACTGCGAGAGCGCCAGAGAACGG |
| | CAGAAAGTGACCGAGCGGACCGTGTCTCTGTGGTCCCTGATCAACAGCAACAAAGAGAAATTC |
| | AAGAACCCCTTCTACACCAAAGAAATCAACCGGGTGCTGTACCCCGTGGCCAGCATGAGACAT |
| | CTGGAACTGTGGGTCAACTACTACATCCGGTGGAACCCCAGAATCAAGCAGCAGCAGCCCAAT |
| | CCTGTGGAACAGCGGTACATGGAACTGCTGGCCCTGCGGGACGAGTACATCAAGAGACTGGA |
| | AGAACTGCAGCTGGCCAACAGCGCCAAGCTGAGCGATCCTCCTACAAGCCCTAGCAGCCCCAG |
| | CCAGATGATGCCTCACGTGCAGACCCACTTTTAATTAAGATCTTTTTCCCTCTGCCAAAAATTAT |
| | GGGGACATCATGAAGCCCCTTGAGCATCTGACTTCTGGCTAATAAAGGAAATTTATTTTCATTG |
| | CAATAGTGTGTTGGAATTTTTTGTGTCTCTCActcgagGCCTaggaacccctagtgatggagttggccactcc |
| | ctctctgcgcgctcgctcgctcactgaggccgggcgaccaaaggtcgcccgacgcccgggctttgcccgggcggcctcagtg |
| | agcgagcgagcgcgcagagagggagtggccaa |
| SEQ ID | ttggccactccctctctgcgcgctcgctcgctcactgaggccgcccgggcaaagcccgggcgtcgggcgacctttggtcgccc |
| NO: 183 | ggcctcagtgagcgagcgagcgcgcagagagggagtggccaactccatcactaggggttcctTGCGCAcaggtaccccc |
| (E3) | ctgcccccacagctcctctcctgtgccttgtttcccagccatgcgttctcctctataaatacccgctctggtatttggggttggca |
| | gctgttgctgccagggagatggttgggttgacatgcggctcctgacaaaacacaaacccctggtgtgtgtgggcgtgggtggt |
| | gtgagtagggggatgaatcagggagggggcgggggacccagggggcaggagccacacaaagtctgtgcggggggggag |
| | cgcacatagcaattggaaactggctgcagacatgcttgctgcctgccctggcgaaggattggtaggcttgccgtcacaggac |
| | ccccgctggctgactcaggggcgcaggctcttgcgggggagctggcctcccgcccccacggccacgggccctttcctggcag |
| | gacagcgggatcttgcagctgtcaggggaggggaggcgggggctgatgtcaggagggatacaaatagtgccgacggctgg |
| | gggccctgtctcccctcgccgcatccactctccggccggccgcctgcccgccgcctcctccgtgcgcccgccagcctcgcccgc |
| | gccgtcaccGATATCtcagatogcctggagacgccatccacgctgttttgacctccatagaagacaccgggaccgatcca |
| | gcctccgcggattcgaaTCCCGGCCGGGAACGGTGCATTGGAACGCGGATTCCCCGTGCCAAGAGT |
| | GACGTAAGTACCGCCTATAGAGTCTATAGGCCCACAAAAAATGCTTTCTTCTTTTAATATACTTT |
| | TTTGTTTATCTTATTTCTAATACTTTCCCTAATCTCTTTCTTTCAGGGCAATAATGATACAATGTAT |
| | CATGCCTCTTTGCACCATTCTAAAGAATAACAGTGATAATTTCTGGGTTAAGGCAATAGCAATA |
| | TTTCTGCATATAAATATTTCTGCATATAAATTGTAACTGATGTAAGAGGTTTCATATTGCTAATA |
| | GCAGCTACAATCCAGCTACCATTCTGCTTTTATTTTATGGTTGGGATAAGGCTGGATTATTCTGA |
| | GTCCAAGCTAGGCCCTTTTGCTAATCATGTTCATACCTCTTATCTTCCTCCCACAGCTCCTGGGC |
| | AACGTGCTGGTCTGTGTGCTGGCCCATCACTTTGGCAAAGAATTTGAGCGGCCGCCACCATGG |
| | CTTCTGCATCAACTTCTAAATATAATTCACACTCCTTGGAGAATGAGTCTATTAAGAGGACGTCT |
| | CGAGATGGAGTCAATCGAGATCTCACTGAGGCTGTTCCTCGACTTCCAGGAGAAACACTAATC |
| | ACTGACAAAGAAGTTATTTACATATGTCCTTTCAATGGCCCCATTAAGGGAAGAGTTTACATCA |
| | CAAATTATCGTCTTTATTTAAGAAGTTTGGAAACGGATTCTTCTCTAATACTTGATGTTCCTCTG |
| | GGTGTGATCTCGAGAATTGAAAAAATGGGAGGCGCGACAAGTAGAGGAGAAAATTCCTATGG |
| | TCTAGATATTACTTGTAAAGACATGAGAAACCTGAGGTTCGCTTTGAAACAGGAAGGCCACAG |
| | CAGAAGAGATATGTTTGAGATCCTCACGAGATACGCGTTTCCCCTGGCTCACAGTCTGCCATTA |
| | TTTGCATTTTTAAATGAAGAAAAGTTTAACGTGGATGGATGGACAGTTTACAATCCAGTGGAA |
| | GAATACAGGAGGCAGGGCTTGCCCAATCACCATTGGAGAATAACTTTTATTAATAAGTGCTAT |
| | GAGCTCTGTGACACTTACCCTGCTCTTTTGGTGGTTCCGTATCGTGCCTCAGATGATGACCTCCG |
| | GAGAGTTGCAACTTTTAGGTCCCGAAATCGAATTCCAGTGCTGTCATGGATTCATCCAGAAAAT |
| | AAGACGGTCATTGTGCGTTGCAGTCAGCCTCTTGTCGGTATGAGTGGGAAACGAAATAAAGAT |
| | GATGAGAAATATCTCGATGTTATCAGGGAGACTAATAAACAAATTTCTAAACTCACCATTTATG |
| | ATGCAAGACCCAGCGTAAATGCAGTGGCCAACAAGGCAACAGGAGGAGGATATGAAAGTGAT |
| | GATGCATATCATAACGCCGAACTTTTCTTCTTAGACATTCATAATATTCATGTTATGCGGGAATC |
| | TTTAAAAAAAGTGAAGGACATTGTTTATCCTAATGTAGAAGAATCTCATTGGTTGTCCAGTTTG |
| | GAGTCTACTCATTGGTTAGAACATATCAAGCTCGTTTTGACAGGAGCCATTCAAGTAGCAGACA |
| | AAGTTTCTTCAGGGAAGAGTTCAGTGCTTGTGCATTGCAGTGACGGATGGGACAGGACTGCTC |
| | AGCTGACATCCTTGGCCATGCTGATGTTGGATAGCTTCTATAGGAGCATTGAAGGGTTCGAAA |
| | TACTGGTACAAAAAGAATGGATAAGTTTTGGACATAAATTTGCATCTCGAATAGGTCATGGTG |
| | ATAAAAACCACACCGATGCTGACCGTTCTCCTATTTTTCTCCAGTTTATTGATTGTGTGTGGCAA |
| | ATGTCAAAACAGTTCCCTACAGCTTTTGAATTCAATGAACAATTTTTGATTATAATTTTGGATCA |
| | TCTGTATAGTTGCCGATTTGGTACTTTCTTATTCAACTGTGAATCTGCTCGAGAAAGACAGAAG |
| | GTTACAGAAAGGACTGTTTCTTTATGGTCACTGATAAACAGTAATAAAGAAAAATTCAAAAACC |
| | CATTCTATACTAAAGAAATCAATAGAGTTTTATATCCAGTTGCAAGTATGCGTCACTTGGAACTC |
| | TGGGTGAATTACTACATTAGATGGAACCCCAGGATCAAACAACAACAACCAAATCCAGTGGAA |
| | CAACGTTACATGGAACTCTTAGCCTTACGAGATGAATACATAAAACGGCTTGAGGAACTGCAA |
| | CTAGCAAACTCTGCAAAACTTTCTGATCCCCCAACTTCACCTTCCAGTCCTTCTCAAATGATGCC |
| | ACATGTGCAAACTCACTTTTAATTAAGATCTTTTTCCCTCTGCCAAAAATTATGGGGACATCATG |
| | AAGCCCCTTGAGCATCTGACTTCTGGCTAATAAAGGAAATTTATTTTCATTGCAATAGTGTGTT |
| | GGAATTTTTTGTGTCTCTCActcgagGCCTaggaacccctagtgatggagttggccactccctctctgcgcgctcgc |
| | tcgctcactgaggccgggcgaccaaaggtcgcccgacgcccgggctttgcccgggcggcctcagtgagcgagcgagcgcgc |
| | agagagggagtggccaa |
| SEQ ID | ttggccactccctctctgcgcgctcgctcgctcactgaggccgcccgggcaaagcccgggcgtcgggcgacctttggtcgccc |
| NO: 184 | ggcctcagtgagcgagcgagcgcgcagagagggagtggccaactccatcactaggggttcctTGCGCAcaggtaccccc |
| (E4) | ctgcccccacagctcctctcctgtgccttgtttcccagccatgcgttctcctctataaatacccgctctggtatttggggttggca |
| | gctgttgctgccagggagatggttgggttgacatgcggctcctgacaaaacacaaacccctggtgtgtgtgggcgtgggtggt |
| | gtgagtagggggatgaatcagggagggggcgggggacccagggggcaggagccacacaaagtctgtgcggggggggag |
| | cgcacatagcaattggaaactggctgcagacatgcttgctgcctgccctggcgaaggattggtaggcttgccgtcacaggac |
| | ccccgctggctgactcaggggcgcaggctcttgcgggggagctggcctcccgcccccacggccacgggccctttcctggcag |
| | gacagcgggatcttgcagctgtcaggggaggggaggcgggggctgatgtcaggagggatacaaatagtgccgacggctgg |
| | gggccctgtctcccctcgccgcatccactctccggcoggccgcctgcccgccgcctcctccgtgcgcccgccagcctcgcccgc |
| | gccgtcaccGATATCtcagatcgcctggagacgccatccacgctgttttgacctccatagaagacaccgggaccgatcca |
| | gcctocgcggattcgaaTCCCGGCCGGGAACGGTGCATTGGAACGCGGATTCCCCGTGCCAAGAGT |
| | GACGTAAGTACCGCCTATAGAGTCTATAGGCCCACAAAAAATGCTTTCTTCTTTTAATATACTTT |
| | TTTGTTTATCTTATTTCTAATACTTTCCCTAATCTCTTTCTTTCAGGGCAATAATGATACAATGTAT |
| | CATGCCTCTTTGCACCATTCTAAAGAATAACAGTGATAATTTCTGGGTTAAGGCAATAGCAATA |
| | TTTCTGCATATAAATATTTCTGCATATAAATTGTAACTGATGTAAGAGGTTTCATATTGCTAATA |
| | GCAGCTACAATCCAGCTACCATTCTGCTTTTATTTTATGGTTGGGATAAGGCTGGATTATTCTGA |
| | GTCCAAGCTAGGCCCTTTTGCTAATCATGTTCATACCTCTTATCTTCCTCCCACAGCTCCTGGGC |
| | AACGTGCTGGTCTGTGTGCTGGCCCATCACTTTGGCAAAGAATTTGAGCGGCCGCCACCatggct |
| | tctgcatcaacttctaaatataattcacactccttggagaatgagtctattaagaggacgtctcgagatggagtcaatcgaga |
| | tctcactgaggctgttcctcgacttccaggagaaacactaatcactgacaaagaagttatttacatatgtcctttcaatggccc |
| | cattaagggaagagtttacatcacaaattatcgtctttatttaagaagtttggaaacggattcttctctaatacttgatgttoct |
| | ctgggtgtgatctcgagaattgaaaaaatgggaggcgcgacaagtagaggagaaaattcctatggtctagatattacttgta |
| | aagacatgagaaacctgaggttcgctttgaaacaggaaggccacagcagaagagatatgtttgagatcctcacgagatacg |
| | cgtttcccctggctcacagtctgccattatttgcatttttaaatgaagaaaagtttaacgtggatggatggacagtttacaatcc |
| | agtggaagaatacaggaggcagggcttgcccaatcaccattggagaataacttttattaataagtgctatgagctctgtgac |
| | acttaccctgctcttttggtggttccgtatcgtgcctcagatgatgacctccggagagttgcaacttttaggtcccgaaatcgaa |
| | ttccagtgctgtcatggattcatccagaaaataagacggtcattgtgcgttgcagtcagcctcttgtcggtatgagtgggaaac |
| | gaaataaagatgatgagaaatatctcgatgttatcagggagactaataaacaaatttctaaactcaccatttatgatgcaag |
| | acccagcgtaaatgcagtggccaacaaggcaacaggaggaggatatgaaagtgatgatgcatatcataacgccgaactttt |
| | cttcttagacattcataatattcatgttatgcgggaatctttaaaaaaagtgaaggacattgtttatcctaatgtagaagaatct |
| | cattggttgtccagtttggagtctactcattggttagaacatatcaagctcgttttgacaggagccattcaagtagcagacaaa |
| | gtttcttcagggaagagttcagtgcttgtgcattgcagtgacggatgggacaggactgctcagctgacatccttggccatgct |
| | gatgttggatagcttctataggagcattgaagggttcgaaatactggtacaaaaagaatggataagttttggacataaatttg |
| | catctcgaataggtcatggtgataaaaaccacaccgatgctgaccgttctcctatttttctccagtttattgattgtgtgtggca |
| | aatgtcaaaacagttccctacagcttttgaattcaatgaacaatttttgattataattttggatcatctgtatagttgccgatttg |
| | gtactttcttattcaactgtgaatctgctcgagaaagacagaaggttacagaaaggactgtttctttatggtcactgataaaca |
| | gtaataaagaaaaattcaaaaaccccttctatactaaagaaatcaatcgagttttatatccagttgccagtatgcgtcacttg |
| | gaactctgggtgaattactacattagatggaaccccaggatcaagcaacaacagccgaatccagtggagcagcgttacatg |
| | gagctcttagccttacgcgacgaatacataaagcggcttgaggaactgcagctcgccaactctgccaagctttctgatccccc |
| | aacttcaccttccagtccttcgcaaatgatgccccatgtgcaaactcacttttaaTTAAGATCTTTTTCCCTCTGCCA |
| | AAAATTATGGGGACATCATGAAGCCCCTTGAGCATCTGACTTCTGGCTAATAAAGGAAATTTAT |
| | TTTCATTGCAATAGTGTGTTGGAATTTTTTGTGTCTCTCActcgagGCCTaggaacccctagtgatggagt |
| | tggccactccctctctgcgcgctcgctcgctcactgaggccgggcgaccaaaggtcgcccgacgcccgggctttgcccgggc |
| | ggcctcagtgagcgagcgagcgcgcagagagggagtggccaa |
| SEQ ID | ttggccactccctctctgcgcgctcgctcgctcactgaggccgcccgggcaaagcccgggcgtcgggcgacctttggtcgccc |
| NO: 185 | ggcctcagtgagcgagcgagcgcgcagagagggagtggccaactccatcactaggggttcctTGCGCAcaggtaccccc |
| (E5) | ctgcccccacagctcctctcctgtgccttgtttcccagccatgcgttctcctctataaatacccgctctggtatttggggttggca |
| | gctgttgctgccagggagatggttgggttgacatgcggctcctgacaaaacacaaacccctggtgtgtgtgggcgtgggtggt |
| | gtgagtagggggatgaatcagggagggggcgggggacccagggggcaggagccacacaaagtctgtgcggggggggag |
| | cgcacatagcaattggaaactggctgcagacatgcttgctgcctgccctggcgaaggattggtaggcttgccgtcacaggac |
| | ccccgctggctgactcaggggcgcaggctcttgcgggggagctggcctcccgcccccacggccacgggccctttcctggcag |
| | gacagcgggatcttgcagctgtcaggggaggggaggcgggggctgatgtcaggagggatacaaatagtgccgacggctgg |
| | gggccctgtctcccctcgccgcatccactctccggcoggccgcctgcccgccgcctcctccgtgcgcccgccagcctcgcccgc |
| | gccgtcaccGATATCtcagatcgcctggagacgccatccacgctgttttgacctccatagaagacaccgggaccgatcca |
| | gcctccgcggattcgaaTCCCGGCCGGGAACGGTGCATTGGAACGCGGATTCCCCGTGCCAAGAGT |
| | GACGTAAGTACCGCCTATAGAGTCTATAGGCCCACAAAAAATGCTTTCTTCTTTTAATATACTTT |
| | TTTGTTTATCTTATTTCTAATACTTTCCCTAATCTCTTTCTTTCAGGGCAATAATGATACAATGTAT |
| | CATGCCTCTTTGCACCATTCTAAAGAATAACAGTGATAATTTCTGGGTTAAGGCAATAGCAATA |
| | TTTCTGCATATAAATATTTCTGCATATAAATTGTAACTGATGTAAGAGGTTTCATATTGCTAATA |
| | GCAGCTACAATCCAGCTACCATTCTGCTTTTATTTTATGGTTGGGATAAGGCTGGATTATTCTGA |
| | GTCCAAGCTAGGCCCTTTTGCTAATCATGTTCATACCTCTTATCTTCCTCCCACAGCTCCTGGGC |
| | AACGTGCTGGTCTGTGTGCTGGCCCATCACTTTGGCAAAGAATTTGAGCGGCCGCCACCATGG |
| | CCTCTGCCAGCACCTCTAAGTACAACAGCCACTCCCTGGAAAATGAATCCATCAAAAGGACCAG |
| | CAGAGATGGAGTGAACAGAGACCTAACTGAAGCTGTGCCAAGACTGCCTGGAGAGACCCTGA |
| | TCACAGACAAGGAAGTGATCTACATCTGCCCCTTCAATGGCCCTATCAAGGGAAGGGTGTACA |
| | TCACCAACTACAGGCTTTACCTGAGATCCCTGGAGACAGACAGCAGCCTGATCCTGGATGTGC |
| | CTCTGGGAGTGATCAGCAGAATAGAGAAGATGGGGGGTGCCACCAGCAGAGGAGAGAACAG |
| | CTATGGCCTGGACATCACCTGCAAGGACATGAGAAACCTGAGATTTGCCCTGAAGCAGGAGG |
| | GCCACAGCAGAAGAGACATGTTTGAAATCCTGACCAGGTATGCCTTCCCCCTGGCCCACTCTCT |
| | CCCCCTGTTTGCCTTCCTGAATGAGGAAAAGTTCAATGTTGATGGCTGGACAGTGTACAACCCA |
| | GTGGAGGAGTACAGAAGACAGGGCCTGCCTAACCACCACTGGAGGATCACCTTCATCAACAA |
| | GTGCTATGAACTGTGTGACACATACCCTGCCCTGCTGGTGGTGCCTTACAGAGCCTCAGATGAT |
| | GACCTGAGAAGAGTTGCCACCTTCAGAAGCAGGAACAGAATCCCTGTACTGAGCTGGATCCAC |
| | CCTGAGAATAAGACTGTGATTGTGAGGTGCAGCCAGCCCCTGGTGGGCATGAGTGGCAAGAG |
| | AAACAAAGATGATGAAAAGTACCTGGATGTGATCAGAGAGACCAACAAACAGATCAGCAAGC |
| | TCACCATCTATGATGCTAGACCCTCTGTTAATGCTGTGGCCAACAAGGCCACAGGGGGAGGCT |
| | ATGAATCTGATGATGCTTACCACAATGCTGAGCTGTTCTTCCTGGACATCCACAACATCCATGT |
| | GATGAGAGAATCCCTCAAGAAAGTGAAGGACATTGTGTACCCTAATGTGGAAGAAAGTCACT |
| | GGCTGAGCAGCTTGGAGTCCACCCACTGGCTGGAGCACATCAAGCTGGTCCTGACAGGAGCC |
| | ATCCAGGTGGCTGACAAGGTGAGTTCTGGCAAGTCCTCAGTGCTGGTCCACTGCTCTGATGGC |
| | TGGGACAGAACTGCCCAGCTGACCAGTCTGGCCATGCTGATGCTGGACTCCTTCTACAGAAGC |
| | ATTGAAGGCTTTGAAATCCTGGTGCAAAAGGAATGGATCTCTTTTGGCCACAAGTTTGCCAGCA |
| | GAATTGGCCATGGTGACAAAAACCACACAGATGCTGACAGAAGCCCTATCTTCCTGCAGTTCAT |
| | TGACTGTGTGTGGCAGATGAGCAAGCAGTTCCCCACAGCATTTGAGTTCAATGAGCAGTTCCT |
| | AATAATCATCCTGGACCACCTCTACAGCTGCAGATTTGGCACCTTCCTGTTCAACTGTGAGTCTG |
| | CCAGAGAAAGACAGAAGGTGACAGAGAGGACAGTGAGCCTGTGGAGCCTGATCAACTCCAAC |
| | AAGGAGAAGTTCAAGAACCCCTTCTACACCAAGGAAATCAACAGGGTGCTGTACCCTGTGGCT |
| | AGCATGAGGCACCTGGAGCTGTGGGTCAACTACTACATCAGATGGAACCCTAGAATCAAACAG |
| | CAACAACCCAACCCTGTGGAGCAGAGGTACATGGAGTTACTGGCCCTGAGGGATGAGTACATC |
| | AAGAGACTGGAGGAGCTGCAGCTGGCCAACTCTGCCAAACTGTCTGACCCTCCTACCTCCCCCA |
| | GCTCCCCCTCTCAGATGATGCCACATGTGCAGACCCACTTTTAATTAAGATCTTTTTCCCTCTGC |
| | CAAAAATTATGGGGACATCATGAAGCCCCTTGAGCATCTGACTTCTGGCTAATAAAGGAAATTT |
| | ATTTTCATTGCAATAGTGTGTTGGAATTTTTTGTGTCTCTCActcgagGCCTaggaacccctagtgatgg |
| | agttggccactccctctctgcgcgctcgctcgctcactgaggccgggcgaccaaaggtcgcccgacgcccgggctttgcccgg |
| | gcggcctcagtgagcgagcgagcgcgcagagagggagtggccaa |
| SEQ ID | ttggccactccctctctgcgcgctcgctcgctcactgaggccgcccgggcaaagcccgggcgtcgggcgacctttggtcgccc |
| NO: 186 | ggcctcagtgagcgagcgagcgcgcagagagggagtggccaactccatcactaggggttcctTGCGCAcaggtaccgac |
| (E6) | attgattattgactagttattaatagtaatcaattacggggtcattagttcatagcccatatatggagttccgcgttacataact |
| | tacggtaaatggcccgcctggctgaccgcccaacgacccccgcccattgacgtcaataatgacgtatgttcccatagtaacgc |
| | caatagggactttccattgacgtcaatgggtggagtatttacggtaaactgcccacttggcagtacatcaagtgtatcatatgc |
| | caagtacgccccctattgacgtcaatgacggtaaatggcccgcctggcattatgcccagtacatgaccttatgggactttccta |
| | cttggcagtacatctacgtattagtcatcgctattaccatggtcgaggtgagccccacgttctgcttcactctccccatctcccc |
| | cccctccccacccccaattttgtatttatttattttttaattattttgtgcagcgatgggggcggggggggggggggggcgcgcg |
| | ccaggcggggcggggggggcgaggggggggcggggcgaggcggagaggtgcggcggcagccaatcagagcggcgcg |
| | ctccgaaagtttccttttatggcgaggcggcggcggcggcggccctataaaaagcgaagcgcgcggcgggcgGATATCtc |
| | agatcgcctggagacgccatccacgctgttttgacctccatagaagacaccgggaccgatccagcctccgoggattcgaaTC |
| | CCGGCCGGGAACGGTGCATTGGAACGCGGATTCCCCGTGCCAAGAGTGACGTAAGTACCGCC |
| | TATAGAGTCTATAGGCCCACAAAAAATGCTTTCTTCTTTTAATATACTTTTTTGTTTATCTTATTTC |
| | TAATACTTTCCCTAATCTCTTTCTTTCAGGGCAATAATGATACAATGTATCATGCCTCTTTGCACC |
| | ATTCTAAAGAATAACAGTGATAATTTCTGGGTTAAGGCAATAGCAATATTTCTGCATATAAATA |
| | TTTCTGCATATAAATTGTAACTGATGTAAGAGGTTTCATATTGCTAATAGCAGCTACAATCCAGC |
| | TACCATTCTGCTTTTATTTTATGGTTGGGATAAGGCTGGATTATTCTGAGTCCAAGCTAGGCCCT |
| | TTTGCTAATCATGTTCATACCTCTTATCTTCCTCCCACAGCTCCTGGGCAACGTGCTGGTCTGTG |
| | TGCTGGCCCATCACTTTGGCAAAGAATTTGAGCGGCCGCCACCATGGCATCAGCAAGCACAAG |
| | CAAATACAACTCACATAGCCTGGAAAACGAGAGCATCAAGAGAACCTCAAGGGACGGGGTCA |
| | ATAGAGATCTGACAGAGGCAGTGCCAAGGCTGCCTGGAGAGACACTGATCACAGACAAGGAA |
| | GTGATCTACATCTGCCCTTTCAACGGCCCAATCAAGGGCCGCGTGTATATCACCAATTACAGAC |
| | TGTACCTGCGGAGCCTGGAGACAGATAGCTCCCTGATCCTGGACGTGCCTCTGGGCGTGATCA |
| | GCAGAATCGAGAAGATGGGAGGAGCCACCTCTAGGGGAGAGAACAGCTACGGCCTGGATAT |
| | CACCTGTAAGGACATGCGCAATCTGCGGTTTGCCCTGAAGCAGGAGGGCCACTCCCGGAGAG |
| | ATATGTTCGAGATCCTGACCAGATATGCCTTTCCCCTGGCCCACTCTCTGCCTCTGTTCGCCTTTC |
| | TGAACGAGGAGAAGTTCAATGTGGACGGCTGGACAGTGTACAACCCCGTGGAGGAGTATAGG |
| | CGCCAGGGCCTGCCTAACCACCACTGGCGGATCACCTTTATCAATAAGTGCTACGAGCTGTGC |
| | GATACATATCCAGCCCTGCTGGTGGTGCCCTACAGAGCCAGCGACGATGACCTGCGGAGAGTG |
| | GCCACCTTCCGGAGCCGGAACAGAATCCCTGTGCTGAGCTGGATCCACCCAGAGAATAAGACA |
| | GTGATCGTGCGCTGCTCCCAGCCACTGGTGGGAATGTCTGGCAAGCGGAACAAGGATGACGA |
| | GAAGTACCTGGATGTGATCAGAGAGACAAATAAGCAGATCAGCAAGCTGACAATCTATGATG |
| | CCCGGCCTTCTGTGAATGCAGTGGCAAATAAGGCAACAGGAGGAGGATATGAGTCTGATGAC |
| | GCCTATCACAACGCCGAGCTGTTCTTTCTGGATATCCACAATATCCACGTGATGAGAGAGTCCC |
| | TGAAGAAGGTGAAGGACATCGTGTACCCAAACGTGGAGGAGTCCCACTGGCTGTCTAGCCTG |
| | GAGTCTACCCACTGGCTGGAGCACATCAAGCTGGTGCTGACAGGCGCCATCCAGGTGGCCGAT |
| | AAGGTGTCCTCTGGCAAGAGCTCCGTGCTGGTGCACTGTTCCGATGGGTGGGACAGAACAGC |
| | ACAGCTGACAAGCCTGGCtATGCTGATGCTGGACTCCTTCTATAGATCTATCGAGGGCTTTGAG |
| | ATCCTGGTGCAGAAGGAGTGGATCAGCTTCGGCCACAAGTTTGCCTCCAGGATCGGCCACGGC |
| | GATAAGAATCACACCGATGCCGACCGCAGCCCTATCTTCCTGCAGTTTATCGACTGCGTGTGGC |
| | AGATGTCCAAGCAGTTCCCAACCGCCTTCGAGTTTAACGAGCAGTTTCTGATCATCATCCTGGA |
| | CCACCTGTACTCCTGCAGGTTCGGCACATTCCTGTTTAATTGTGAGTCTGCCAGAGAGAGGCAG |
| | AAGGTGACCGAGCGCACAGTGTCTCTGTGGAGCCTGATCAACAGCAATAAGGAGAAGTTCAA |
| | GAACCCCTTCTACACAAAGGAGATCAATCGCGTGCTGTATCCTGTGGCATCCATGAGACACCTG |
| | GAGCTGTGGGTGAACTACTATATCCGCTGGAATCCCCGGATCAAGCAGCAGCAGCCCAACCCT |
| | GTGGAGCAGCGGTACATGGAGCTGCTGGCCCTGAGAGATGAGTATATCAAGAGGCTGGAGG |
| | AGCTGCAGCTGGCCAATAGCGCCAAGCTGTCCGACCCACCTACTTCACCAAGCAGCCCCTCACA |
| | GATGATGCCCCACGTCCAGACCCACTTTTAATTAAGATCTTTTTCCCTCTGCCAAAAATTATGGG |
| | GACATCATGAAGCCCCTTGAGCATCTGACTTCTGGCTAATAAAGGAAATTTATTTTCATTGCAAT |
| | AGTGTGTTGGAATTTTTTGTGTCTCTCActcgagGCCTaggaacccctagtgatggagttggccactccctctct |
| | gcgcgctcgctcgctcactgaggccgggcgaccaaaggtcgcccgacgcccgggctttgcccgggcggcctcagtgagcga |
| | gcgagcgcgcagagagggagtggccaa |
| SEQ ID | ttggccactccctctctgcgcgctcgctcgctcactgaggccgcccgggcaaagcccgggcgtcgggcgacctttggtcgccc |
| NO: 187 | ggcctcagtgagcgagcgagcgcgcagagagggagtggccaactccatcactaggggttcctTGCGCAcaggtaccgac |
| (E7) | attgattattgactagttattaatagtaatcaattacggggtcattagttcatagcccatatatggagttccgcgttacataact |
| | tacggtaaatggcccgcctggctgaccgcccaacgacccccgcccattgacgtcaataatgacgtatgttcccatagtaacgc |
| | caatagggactttccattgacgtcaatgggtggagtatttacggtaaactgcccacttggcagtacatcaagtgtatcatatgc |
| | caagtacgccccctattgacgtcaatgacggtaaatggcccgcctggcattatgcccagtacatgaccttatgggactttccta |
| | cttggcagtacatctacgtattagtcatcgctattaccatggtcgaggtgagccccacgttctgcttcactctccccatctcccc |
| | cccctccccacccccaattttgtatttatttattttttaattattttgtgcagcgatgggggcggggggggggggggggcgcgcg |
| | ccaggcggggcggggcggggcgaggggcggggcggggcgaggcggagaggtgcggcggcagccaatcagagcggcgcg |
| | ctccgaaagtttccttttatggcgaggcggcggcggcggcggccctataaaaagcgaagcgcgcggcgggcgGATATCtc |
| | agatcgcctggagacgccatccacgctgttttgacctccatagaagacaccgggaccgatccagcctccgcggattcgaaTC |
| | CCGGCCGGGAACGGTGCATTGGAACGCGGATTCCCCGTGCCAAGAGTGACGTAAGTACCGCC |
| | TATAGAGTCTATAGGCCCACAAAAAATGCTTTCTTCTTTTAATATACTTTTTTGTTTATCTTATTTC |
| | TAATACTTTCCCTAATCTCTTTCTTTCAGGGCAATAATGATACAATGTATCATGCCTCTTTGCACC |
| | ATTCTAAAGAATAACAGTGATAATTTCTGGGTTAAGGCAATAGCAATATTTCTGCATATAAATA |
| | TTTCTGCATATAAATTGTAACTGATGTAAGAGGTTTCATATTGCTAATAGCAGCTACAATCCAGC |
| | TACCATTCTGCTTTTATTTTATGGTTGGGATAAGGCTGGATTATTCTGAGTCCAAGCTAGGCCCT |
| | TTTGCTAATCATGTTCATACCTCTTATCTTCCTCCCACAGCTCCTGGGCAACGTGCTGGTCTGTG |
| | TGCTGGCCCATCACTTTGGCAAAGAATTTGAGCGGCCGCCACCATGGCTAGCGCCAGCACAAG |
| | CAAGTACAACAGCCACAGCCTGGAAAACGAGAGCATCAAGCGGACCAGCAGAGATGGCGTGA |
| | ACAGGGATCTGACAGAGGCCGTGCCTAGACTGCCTGGCGAGACACTGATCACCGACAAAGAA |
| | GTGATCTACATCTGCCCCTTCAACGGCCCCATCAAGGGCCGCGTGTACATCACCAACTACCGGC |
| | TGTACCTGCGGTCCCTGGAAACCGATAGCAGCCTGATCCTGGATGTGCCCCTGGGCGTGATCA |
| | GCCGGATTGAGAAAATGGGCGGAGCCACCTCCAGAGGCGAGAATAGCTACGGCCTGGACATC |
| | ACATGCAAGGACATGCGGAACCTGAGATTCGCCCTGAAGCAAGAGGGCCACAGCAGACGGGA |
| | CATGTTCGAGATCCTGACCAGATACGCCTTTCCTCTGGCTCACTCCCTGCCTCTGTTCGCCTTCCT |
| | GAACGAAGAGAAGTTCAACGTGGACGGCTGGACCGTGTACAACCCCGTGGAAGAGTATCGGA |
| | GACAGGGCCTGCCTAATCACCACTGGCGGATCACCTTCATCAACAAGTGCTACGAGCTGTGCG |
| | ACACATACCCCGCACTGCTGGTGGTGCCTTACAGAGCCTCCGACGACGACCTGAGAAGAGTGG |
| | CCACCTTTCGGAGCCGGAACAGAATCCCTGTGCTGAGCTGGATTCACCCCGAGAACAAGACCG |
| | TGATCGTGCGGTGTTCTCAGCCCCTCGTGGGCATGTCTGGCAAGAGAAACAAGGACGACGAG |
| | AAGTACCTGGACGTGATCCGCGAGACAAACAAGCAGATCAGCAAGCTGACCATCTACGACGCC |
| | AGACCTAGCGTGAACGCCGTGGCCAACAAAGCTACAGGCGGCGGATACGAGAGCGACGACG |
| | CCTATCATAACGCCGAGCTGTTCTTTCTGGACATCCACAACATCCACGTGATGCGGGAAAGCCT |
| | GAAGAAAGTGAAGGACATCGTGTACCCCAATGTGGAAGAGAGCCACTGGCTGAGCAGTCTGG |
| | AAAGCACACACTGGCTGGAACACATCAAGCTGGTGCTGACAGGCGCCATCCAGGTGGCCGAT |
| | AAGGTGTCCTCTGGCAAGTCTAGCGTGCTGGTGCACTGTAGCGACGGCTGGGATAGAACAGC |
| | CCAGCTGACATCTCTGGCCATGCTGATGCTGGACAGCTTCTACAGATCCATCGAGGGCTTTGAG |
| | ATCCTGGTGCAGAAAGAGTGGATCAGCTTCGGCCACAAGTTCGCCAGCAGAATCGGACACGG |
| | CGACAAGAACCACACCGACGCCGATAGAAGCCCCATCTTCCTGCAGTTCATCGACTGCGTGTG |
| | GCAGATGTCCAAGCAGTTCCCTACCGCCTTCGAGTTCAACGAGCAGTTCCTGATCATCATCCTG |
| | GACCACCTGTACAGCTGCAGATTCGGCACCTTCCTGTTCAACTGCGAGAGCGCCAGAGAACGG |
| | CAGAAAGTGACCGAGCGGACCGTGTCTCTGTGGTCCCTGATCAACAGCAACAAAGAGAAATTC |
| | AAGAACCCCTTCTACACCAAAGAAATCAACCGGGTGCTGTACCCCGTGGCCAGCATGAGACAT |
| | CTGGAACTGTGGGTCAACTACTACATCCGGTGGAACCCCAGAATCAAGCAGCAGCAGCCCAAT |
| | CCTGTGGAACAGCGGTACATGGAACTGCTGGCCCTGCGGGACGAGTACATCAAGAGACTGGA |
| | AGAACTGCAGCTGGCCAACAGCGCCAAGCTGAGCGATCCTCCTACAAGCCCTAGCAGCCCCAG |
| | CCAGATGATGCCTCACGTGCAGACCCACTTTTAATTAAGATCTTTTTCCCTCTGCCAAAAATTAT |
| | GGGGACATCATGAAGCCCCTTGAGCATCTGACTTCTGGCTAATAAAGGAAATTTATTTTCATTG |
| | CAATAGTGTGTTGGAATTTTTTGTGTCTCTCActcgagGCCTaggaacccctagtgatggagttggccactcc |
| | ctctctgcgcgctcgctcgctcactgaggccgggcgaccaaaggtcgcccgacgcccgggctttgcccgggcggcctcagtg |
| | agcgagcgagcgcgcagagagggagtggccaa |
| SEQ ID | ttggccactccctctctgcgcgctcgctcgctcactgaggccgcccgggcaaagcccgggcgtcgggcgacctttggtcgccc |
| NO: 188 | ggcctcagtgagcgagcgagcgcgcagagagggagtggccaactccatcactaggggttcctTGCGCAcaggtaccgac |
| (E8) | attgattattgactagttattaatagtaatcaattacggggtcattagttcatagcccatatatggagttccgcgttacataact |
| | tacggtaaatggcccgcctggctgaccgcccaacgacccccgcccattgacgtcaataatgacgtatgttcccatagtaacgc |
| | caatagggactttccattgacgtcaatgggtggagtatttacggtaaactgcccacttggcagtacatcaagtgtatcatatgc |
| | caagtacgccccctattgacgtcaatgacggtaaatggcccgcctggcattatgcccagtacatgaccttatgggactttccta |
| | cttggcagtacatctacgtattagtcatcgctattaccatggtcgaggtgagccccacgttctgcttcactctccccatctcccc |
| | cccctccccacccccaattttgtatttatttattttttaattattttgtgcagcgatgggggcggggggggggggggggcgcg |
| | ccaggcggggcggggcggggcgaggggcggggggggcgaggcggagaggtgcggcggcagccaatcagagcggcgcg |
| | ctccgaaagtttccttttatggcgaggcggcggcggcggcggccctataaaaagcgaagcgcgcggcgggcgGATATCtc |
| | agatcgcctggagacgccatccacgctgttttgacctccatagaagacaccgggaccgatccagcctccgcggattcgaaTC |
| | CCGGCCGGGAACGGTGCATTGGAACGCGGATTCCCCGTGCCAAGAGTGACGTAAGTACCGCC |
| | TATAGAGTCTATAGGCCCACAAAAAATGCTTTCTTCTTTTAATATACTTTTTTGTTTATCTTATTTC |
| | TAATACTTTCCCTAATCTCTTTCTTTCAGGGCAATAATGATACAATGTATCATGCCTCTTTGCACC |
| | ATTCTAAAGAATAACAGTGATAATTTCTGGGTTAAGGCAATAGCAATATTTCTGCATATAAATA |
| | TTTCTGCATATAAATTGTAACTGATGTAAGAGGTTTCATATTGCTAATAGCAGCTACAATCCAGC |
| | TACCATTCTGCTTTTATTTTATGGTTGGGATAAGGCTGGATTATTCTGAGTCCAAGCTAGGCCCT |
| | TTTGCTAATCATGTTCATACCTCTTATCTTCCTCCCACAGCTCCTGGGCAACGTGCTGGTCTGTG |
| | TGCTGGCCCATCACTTTGGCAAAGAATTTGAGCGGCCGCCACCATGGCTTCTGCATCAACTTCT |
| | AAATATAATTCACACTCCTTGGAGAATGAGTCTATTAAGAGGACGTCTCGAGATGGAGTCAAT |
| | CGAGATCTCACTGAGGCTGTTCCTCGACTTCCAGGAGAAACACTAATCACTGACAAAGAAGTT |
| | ATTTACATATGTCCTTTCAATGGCCCCATTAAGGGAAGAGTTTACATCACAAATTATCGTCTTTA |
| | TTTAAGAAGTTTGGAAACGGATTCTTCTCTAATACTTGATGTTCCTCTGGGTGTGATCTCGAGA |
| | ATTGAAAAAATGGGAGGCGCGACAAGTAGAGGAGAAAATTCCTATGGTCTAGATATTACTTGT |
| | AAAGACATGAGAAACCTGAGGTTCGCTTTGAAACAGGAAGGCCACAGCAGAAGAGATATGTT |
| | TGAGATCCTCACGAGATACGCGTTTCCCCTGGCTCACAGTCTGCCATTATTTGCATTTTTAAATG |
| | AAGAAAAGTTTAACGTGGATGGATGGACAGTTTACAATCCAGTGGAAGAATACAGGAGGCAG |
| | GGCTTGCCCAATCACCATTGGAGAATAACTTTTATTAATAAGTGCTATGAGCTCTGTGACACTT |
| | ACCCTGCTCTTTTGGTGGTTCCGTATCGTGCCTCAGATGATGACCTCCGGAGAGTTGCAACTTTT |
| | AGGTCCCGAAATCGAATTCCAGTGCTGTCATGGATTCATCCAGAAAATAAGACGGTCATTGTG |
| | CGTTGCAGTCAGCCTCTTGTCGGTATGAGTGGGAAACGAAATAAAGATGATGAGAAATATCTC |
| | GATGTTATCAGGGAGACTAATAAACAAATTTCTAAACTCACCATTTATGATGCAAGACCCAGCG |
| | TAAATGCAGTGGCCAACAAGGCAACAGGAGGAGGATATGAAAGTGATGATGCATATCATAAC |
| | GCCGAACTTTTCTTCTTAGACATTCATAATATTCATGTTATGCGGGAATCTTTAAAAAAAGTGAA |
| | GGACATTGTTTATCCTAATGTAGAAGAATCTCATTGGTTGTCCAGTTTGGAGTCTACTCATTGGT |
| | TAGAACATATCAAGCTCGTTTTGACAGGAGCCATTCAAGTAGCAGACAAAGTTTCTTCAGGGA |
| | AGAGTTCAGTGCTTGTGCATTGCAGTGACGGATGGGACAGGACTGCTCAGCTGACATCCTTGG |
| | CCATGCTGATGTTGGATAGCTTCTATAGGAGCATTGAAGGGTTCGAAATACTGGTACAAAAAG |
| | AATGGATAAGTTTTGGACATAAATTTGCATCTCGAATAGGTCATGGTGATAAAAACCACACCG |
| | ATGCTGACCGTTCTCCTATTTTTCTCCAGTTTATTGATTGTGTGTGGCAAATGTCAAAACAGTTC |
| | CCTACAGCTTTTGAATTCAATGAACAATTTTTGATTATAATTTTGGATCATCTGTATAGTTGCCG |
| | ATTTGGTACTTTCTTATTCAACTGTGAATCTGCTCGAGAAAGACAGAAGGTTACAGAAAGGACT |
| | GTTTCTTTATGGTCACTGATAAACAGTAATAAAGAAAAATTCAAAAACCCATTCTATACTAAAG |
| | AAATCAATAGAGTTTTATATCCAGTTGCAAGTATGCGTCACTTGGAACTCTGGGTGAATTACTA |
| | CATTAGATGGAACCCCAGGATCAAACAACAACAACCAAATCCAGTGGAACAACGTTACATGGA |
| | ACTCTTAGCCTTACGAGATGAATACATAAAACGGCTTGAGGAACTGCAACTAGCAAACTCTGC |
| | AAAACTTTCTGATCCCCCAACTTCACCTTCCAGTCCTTCTCAAATGATGCCACATGTGCAAACTC |
| | ACTTTTAATTAAGATCTTTTTCCCTCTGCCAAAAATTATGGGGACATCATGAAGCCCCTTGAGCA |
| | TCTGACTTCTGGCTAATAAAGGAAATTTATTTTCATTGCAATAGTGTGTTGGAATTTTTTGTGTC |
| | TCTCActcgagGCCTaggaacccctagtgatggagttggccactccctctctgcgcgctcgctcgctcactgaggccgggc |
| | gaccaaaggtcgcccgacgcccgggctttgcccgggcggcctcagtgagcgagcgagcgcgcagagagggagtggccaa |
| SEQ ID | ttggccactccctctctgcgcgctcgctcgctcactgaggccgcccgggcaaagcccgggcgtcgggcgacctttggtcgccc |
| NO: 189 | ggcctcagtgagcgagcgagcgcgcagagagggagtggccaactccatcactaggggttcctTGCGCAcaggtaccgac |
| (E9) | attgattattgactagttattaatagtaatcaattacggggtcattagttcatagcccatatatggagttccgcgttacataact |
| | tacggtaaatggcccgcctggctgaccgcccaacgacccccgcccattgacgtcaataatgacgtatgttcccatagtaacgc |
| | caatagggactttccattgacgtcaatgggtggagtatttacggtaaactgcccacttggcagtacatcaagtgtatcatatgc |
| | caagtacgccccctattgacgtcaatgacggtaaatggcccgcctggcattatgcccagtacatgaccttatgggactttccta |
| | cttggcagtacatctacgtattagtcatcgctattaccatggtcgaggtgagccccacgttctgcttcactctccccatctcccc |
| | cccctccccacccccaattttgtatttatttattttttaattattttgtgcagcgatgggggcggggggggggggggggcgcgcg |
| | ccaggcggggcggggcggggcgaggggcggggcggggcgaggcggagaggtgcggcggcagccaatcagagcggcgcg |
| | ctccgaaagtttccttttatggcgaggcggcggcggcggcggccctataaaaagcgaagcgcgcggcgggcgGATATCtc |
| | agatcgcctggagacgccatccacgctgttttgacctccatagaagacaccgggaccgatccagcctccgcggattcgaaTC |
| | CCGGCCGGGAACGGTGCATTGGAACGCGGATTCCCCGTGCCAAGAGTGACGTAAGTACCGCC |
| | TATAGAGTCTATAGGCCCACAAAAAATGCTTTCTTCTTTTAATATACTTTTTTGTTTATCTTATTTC |
| | TAATACTTTCCCTAATCTCTTTCTTTCAGGGCAATAATGATACAATGTATCATGCCTCTTTGCACC |
| | ATTCTAAAGAATAACAGTGATAATTTCTGGGTTAAGGCAATAGCAATATTTCTGCATATAAATA |
| | TTTCTGCATATAAATTGTAACTGATGTAAGAGGTTTCATATTGCTAATAGCAGCTACAATCCAGC |
| | TACCATTCTGCTTTTATTTTATGGTTGGGATAAGGCTGGATTATTCTGAGTCCAAGCTAGGCCCT |
| | TTTGCTAATCATGTTCATACCTCTTATCTTCCTCCCACAGCTCCTGGGCAACGTGCTGGTCTGTG |
| | TGCTGGCCCATCACTTTGGCAAAGAATTTGAGCGGCCGCCACCatggcttctgcatcaacttctaaatata |
| | attcacactccttggagaatgagtctattaagaggacgtctcgagatggagtcaatcgagatctcactgaggctgttcctcga |
| | cttccaggagaaacactaatcactgacaaagaagttatttacatatgtcctttcaatggccccattaagggaagagtttacat |
| | cacaaattatcgtctttatttaagaagtttggaaacggattcttctctaatacttgatgttcctctgggtgtgatctcgagaattg |
| | aaaaaatgggaggcgcgacaagtagaggagaaaattcctatggtctagatattacttgtaaagacatgagaaacctgaggt |
| | tcgctttgaaacaggaaggccacagcagaagagatatgtttgagatcctcacgagatacgcgtttcccctggctcacagtctg |
| | ccattatttgcatttttaaatgaagaaaagtttaacgtggatggatggacagtttacaatccagtggaagaatacaggaggc |
| | agggcttgcccaatcaccattggagaataacttttattaataagtgctatgagctctgtgacacttaccctgctcttttggtggt |
| | tccgtatcgtgcctcagatgatgacctccggagagttgcaacttttaggtcccgaaatcgaattccagtgctgtcatggattca |
| | tccagaaaataagacggtcattgtgcgttgcagtcagcctcttgtcggtatgagtgggaaacgaaataaagatgatgagaaa |
| | tatctcgatgttatcagggagactaataaacaaatttctaaactcaccatttatgatgcaagacccagcgtaaatgcagtggc |
| | caacaaggcaacaggaggaggatatgaaagtgatgatgcatatcataacgccgaacttttcttcttagacattcataatattc |
| | atgttatgcgggaatctttaaaaaaagtgaaggacattgtttatcctaatgtagaagaatctcattggttgtccagtttggagt |
| | ctactcattggttagaacatatcaagctcgttttgacaggagccattcaagtagcagacaaagtttcttcagggaagagttca |
| | gtgcttgtgcattgcagtgacggatgggacaggactgctcagctgacatccttggccatgctgatgttggatagcttctatagg |
| | agcattgaagggttcgaaatactggtacaaaaagaatggataagttttggacataaatttgcatctcgaataggtcatggtg |
| | ataaaaaccacaccgatgctgaccgttctcctatttttctccagtttattgattgtgtgtggcaaatgtcaaaacagttccctac |
| | agcttttgaattcaatgaacaatttttgattataattttggatcatctgtatagttgccgatttggtactttcttattcaactgtga |
| | atctgctcgagaaagacagaaggttacagaaaggactgtttctttatggtcactgataaacagtaataaagaaaaattcaaa |
| | aaccccttctatactaaagaaatcaatcgagttttatatccagttgccagtatgcgtcacttggaactctgggtgaattactac |
| | attagatggaaccccaggatcaagcaacaacagccgaatccagtggagcagcgttacatggagctcttagccttacgcgac |
| | gaatacataaagcggcttgaggaactgcagctcgccaactctgccaagctttctgatcccccaacttcaccttccagtccttcg |
| | caaatgatgccccatgtgcaaactcacttttaaTTAAGATCTTTTTCCCTCTGCCAAAAATTATGGGGACAT |
| | CATGAAGCCCCTTGAGCATCTGACTTCTGGCTAATAAAGGAAATTTATTTTCATTGCAATAGTG |
| | TGTTGGAATTTTTTGTGTCTCTCActcgagGCCTaggaacccctagtgatggagttggccactccctctctgcgcg |
| | ctcgctcgctcactgaggccgggcgaccaaaggtcgcccgacgcccgggctttgcccgggcggcctcagtgagcgagcgag |
| | cgcgcagagagggagtggccaa |
| SEQ ID | ttgtcGACTCGGTTCGCATATTAAGGTGACGCGTGTGGCCTCGAACACCGAGCGACCCTGCAGC |
| NO: 190 | GACCCGCTTAA |
| (E10A) | |
| SEQ ID | ccactccctctctgcgcgctcgctcgctcactgaggccgggcgaccaaaggtcgcccgacgcccgggctttgcccgggcggc |
| NO: 191 | ctcagtgagcgagcgagcgcgcagagagggagtggccaa |
| (E10B) | |
| SEQ ID | TTTTTTGGTACCTTCGCATATTAAGGTGACGCGTGTGGCCTCGAACACCGAGCGACCCTGCAGC |
| NO: 192 | GACCCGCTTAAGCGGCCGCCACCATGGCATCAGCAAGCACAAGCAAATACAACTCACATAGCC |
| (E11A) | TGGAAAACG |
| SEQ ID | agtgagcgagcgagcgcgcagagagggagtggccaactccatcactaggggttcctTGCGCAcaGGTACCTTCGCA |
| NO: 193 | TATTAAGGTGACGCGTGTGGCCTCGAACACCGAGCGACCCTGCAGCGACCCGCTTAAGCGGCC |
| (E11B) | GCCACCatggcttctgcatcaacttctaaatataattcacactccttggagaatgagtctattaagaggacgtctcgagatg |
| | gagtcaatcgagatctcactgaggctgttcctcgacttccaggagaaacactaatcactgacaaagaagttatttacatatgt |
| | cctttcaatggccccattaagggaagagtttacatcacaaattatcgtctttatttaagaagtttggaaacggattcttctctaa |
| | tacttgatgttcctctgggtgtgatctcgagaattgaaaaaatgggaggcgcgacaagtagaggagaaaattcctatggtct |
| | agatattacttgtaaagacatgagaaacctgaggttcgctttgaaacaggaaggccacagcagaagagatatgtttgagat |
| | cctcacgagatacgcgtttcccctggctcacagtctgccattatttgcatttttaaatgaagaaaagtttaacgtggatggatg |
| | gacagtttacaatccagtggaagaatacaggaggcagggcttgcccaatcaccattggagaataacttttattaataagtgc |
| | tatgagctctgtgacacttaccctgctcttttggtggttccgtatcgtgcctcagatgatgacctccggagagttgcaacttttag |
| | gtcccgaaatcgaattccagtgctgtcatggattcatccagaaaataagacggtcattgtgcgttgcagtcagcctcttgtcgg |
| | tatgagtgggaaacgaaataaagatgatgagaaatatctcgatgttatcagggagactaataaacaaatttctaaactcacc |
| | atttatgatgcaagacccagcgtaaatgcagtggccaacaaggcaacaggaggaggatatgaaagtgatgatgcatatcat |
| | aacgccgaacttttcttcttagacattcataatattcatgttatgcgggaatctttaaaaaaagtgaaggacattgtttatccta |
| | atgtagaagaatctcattggttgtccagtttggagtctactcattggttagaacatatcaagctcgttttgacaggagccattc |
| | aagtagcagacaaagtttcttcagggaagagttcagtgcttgtgcattgcagtgacggatgggacaggactgctcagctgac |
| | atccttggccatgctgatgttggatagcttctataggagcattgaagggttcgaaatactggtacaaaaagaatggataagtt |
| | ttggacataaatttgcatctcgaataggtcatggtgataaaaaccacaccgatgctgaccgttctcctatttttctccagtttat |
| | tgattgtgtgtggcaaatgtcaaaacagttccctacagcttttgaattcaatgaacaatttttgattataattttggatcatctgt |
| | atagttgccgatttggtactttcttattcaactgtgaatctgctcgagaaagacagaaggttacagaaaggactgtttctttatg |
| | gtcactgataaacagtaataaagaaaaattcaaaaaccccttctatactaaagaaatcaatcgagttttatatccagttgcca |
| | gtatgcgtcacttggaactctgggtgaattactacattagatggaaccccaggatcaagcaacaacagccgaatccagtgga |
| | gcagcgttacatggagctcttagccttacgcgacgaatacataaagcggcttgaggaactgcagctcgccaactctgccaag |
| | ctttctgatcccccaacttcaccttccagtccttcgcaaatgatgccccatgtgcaaactcacttttaaTTAAGATCTTTTT |
| | CCCTCTGCCAAAAATTATGGGGACATCATGAAGCCCCTTGAGCATCTGACTTCTGGCTAATAAA |
| | GGAAATTTATTTTCATTGCAATAGTGTGTTGGAATTTTTTGTGTCTCTCActcgagGCCTaggaaccc |
| | ctagtgatggagttggccactccctctctgcgcgctcgctcgctcactgaggccgggcgaccaaaggtcgcccgacgcccgg |
| | gctttgcccgggcggcctcagtgagcgagcgagcgcgcagagagggagtggccaa |
| SEQ ID | tttttGtcGACTTCGCATATTAAGGTGACGCGTGTGGCCTCGAACACCGAGCGACCCTGCAGCGA |
| NO: 194 | CCCGCTTAAGCGGCCGCCACCatggcttctgcatcaacttctaaatataattcacactccttggagaatgagtctatt |
| (E12) | aagaggacgtctcgagatggagtcaatcgagatctcactgaggctgttcctcgacttccaggagaaacactaatcactgaca |
| | aagaagttatttacatatgtcctttcaatggccccattaagggaagagtttacatcacaaattatcgtctttatttaagaagttt |
| | ggaaacggattcttctctaatacttgatgttcctctgggtgtgatctcgagaattgaaaaaatgggaggcgcgacaagtagag |
| | gagaaaattcctatggtctagatattacttgtaaagacatgagaaacctgaggttcgctttgaaacaggaaggccacagcag |
| | aagagatatgtttgagatcctcacgagatacgcgtttcccctggctcacagtctgccattatttgcatttttaaatgaagaaaa |
| | gtttaacgtggatggatggacagtttacaatccagtggaagaatacaggaggcagggcttgcccaatcaccattggagaat |
| | aacttttattaataagtgctatgagctctgtgacacttaccctgctcttttggtggttccgtatcgtgcctcagatgatgacctcc |
| | ggagagttgcaacttttaggtcccgaaatcgaattccagtgctgtcatggattcatccagaaaataagacggtcattgtgcgt |
| | tgcagtcagcctcttgtcggtatgagtgggaaacgaaataaagatgatgagaaatatctcgatgttatcagggagactaata |
| | aacaaatttctaaactcaccatttatgatgcaagacccagcgtaaatgcagtggccaacaaggcaacaggaggaggatatg |
| | aaagtgatgatgcatatcataacgccgaacttttcttcttagacattcataatattcatgttatgcgggaatctttaaaaaaag |
| | tgaaggacattgtttatcctaatgtagaagaatctcattggttgtccagtttggagtctactcattggttagaacatatcaagct |
| | cgttttgacaggagccattcaagtagcagacaaagtttcttcagggaagagttcagtgcttgtgcattgcagtgacggatggg |
| | acaggactgctcagctgacatccttggccatgctgatgttggatagcttctataggagcattgaagggttcgaaatactggta |
| | caaaaagaatggataagttttggacataaatttgcatctcgaataggtcatggtgataaaaaccacaccgatgctgaccgtt |
| | ctcctatttttctccagtttattgattgtgtgtggcaaatgtcaaaacagttccctacagcttttgaattcaatgaacaatttttga |
| | ttataattttggatcatctgtatagttgccgatttggtactttcttattcaactgtgaatctgctcgagaaagacagaaggttac |
| | agaaaggactgtttctttatggtcactgataaacagtaataaagaaaaattcaaaaaccccttctatactaaagaaatcaat |
| | cgagttttatatccagttgccagtatgcgtcacttggaactctgggtgaattactacattagatggaaccccaggatcaagca |
| | acaacagccgaatccagtggagcagcgttacatggagctcttagccttacgcgacgaatacataaagcggcttgaggaact |
| | gcagctcgccaactctgccaagctttctgatcccccaacttcaccttccagtccttcgcaaatgatgccccatgtgcaaactca |
| | cttttaaTTAAGATCTTTTTCCCTCTGCCAAAAATTATGGGGACATCATGAAGCCCCTTGAGCATCT |
| | GACTTCTGGCTAATAAAGGAAATTTATTTTCATTGCAATAGTGTGTTGGAATTTTTTGTGTCTCT |
| | CActccctaggaaaaaa |
| SEQ ID | tttttGtcGACTTCGCATATTAAGGTGACGCGTGTGGCCTCGAACACCGAGCGACCCTGCAGCGA |
| NO: 195 | CCCGCTTAAGCGGCCGCCACCatggcttctgcatcaacttctaaatataattcacactccttggagaatgagtctatt |
| (E13A) | aagaggacgtctcgagatggagtcaatcgagatctcactgaggctgttcctcgacttccaggagaaacactaatcactgaca |
| | aagaagttatttacatatgtcctttcaatggccccattaagggaagagtttacatcacaaattatcgtctttatttaagaagttt |
| | ggaaacggattcttctctaatacttgatgttcctctgggtgtgatctcgagaattgaaaaaatgggaggcgcgacaagtagag |
| | gagaaaattcctatggtctagatattacttgtaaagacatgagaaacctgaggttcgctttgaaacaggaaggccacagcag |
| | aagagatatgtttgagatcctcacgagatacgcgtttcccctggctcacagtctgccattatttgcatttttaaatgaagaaaa |
| | gtttaacgtggatggatggacagtttacaatccagtggaagaatacaggaggcagggcttgcccaatcaccattggagaat |
| | aacttttattaataagtgctatgagctctgtgacacttaccctgctcttttggtggttccgtatcgtgcctcagatgatgacctcc |
| | ggagagttgcaacttttaggtcccgaaatcgaattccagtgctgtcatggattcatccagaaaataagacggtcattgtgcgt |
| | tgcagtcagcctcttgtcggtatgagtgggaaacgaaataaagatgatgagaaatatctcgatgttatcagggagactaata |
| | aacaaatttctaaactcaccatttatgatgcaagacccagcgtaaatgcagtggccaacaaggcaacaggaggaggatatg |
| | aaagtgatgatgcatatcataacgccgaacttttcttcttagacattcataatattcatgttatgcgggaatctttaaaaaaag |
| | tgaaggacattgtttatcctaatgtagaagaatctcattggttgtccagtttggagtctactcattggttagaacatatcaagct |
| | cgttttgacaggagccattcaagtagcagacaaagtttcttcagggaagagttcagtgcttgtgcattgcagtgacggatggg |
| | acaggactgctcagctgacatccttggccatgctgatgttggatagcttctataggagcattgaagggttcgaaatactggta |
| | caaaaagaatggataagttttggacataaatttgcatctcgaataggtcatggtgataaaaaccacaccgatgctgaccgtt |
| | ctcctatttttctccagtttattgattgtgtgtggcaaatgtcaaaacagttccctacagcttttgaattcaatgaacaatttttga |
| | ttataattttggatcatctgtatagttgccgatttggtactttcttattcaactgtgaatctgctcgagaaagacagaaggttac |
| | agaaaggactgtttctttatggtcactgataaacagtaataaagaaaaattcaaaaaccccttctatactaaagaaatcaat |
| | cgagttttatatccagttgccagtatgcgtcacttggaactctgggtgaattactacattagatggaaccccaggatcaagca |
| | acaacagccgaatccagtggagcagcgttacatggagctcttagccttacgcgacgaatacataaagcggcttgaggaact |
| | gcagctcgccaactctgccaagctttctgatcccccaacttcaccttccagtccttcgcaaatgatgccccatgtgcaaactca |
| | cttttaaTTAAGATCTTTTTCCCTCTGCCAAAAATTATGGGGACATCATGAAGCCCCTTGAGCATCT |
| | GACTTCTGGCTAATAAAGGAAATTTATTTTCATTGCAATAGTGTGTTGGAATTTTTTGTGTCTCT |
| | CActccctaggaaaaaa |
| SEQ ID | tttttGtcGACCCTCTATAAATACCCGCTCTGGGTTGGCAGCTGTTGCTGCGGTGTGTGTGGGCGT |
| NO: 196 | GGGTGGTGTGAGTAGGGGGATGAATCAGGGAGGGGGCGGGGGCAGGGGGCAGGAGCCACA |
| (E13B) | CAAACCTGCCCTGGCGAAGACCCCCGCTGGCTGACTCAGGGATCTTGCAGCTGTCAGGGGGG |
| | AGGGATACAAATAGTGCCGACGGCTGGGGGCCCTGTCTCCCCTCGCCGCGGCCGCCACCatggc |
| | ttctgcatcaacttctaaatataattcacactccttggagaatgagtctattaagaggacgtctcgagatggagtcaatcgag |
| | atctcactgaggctgttcctcgacttccaggagaaacactaatcactgacaaagaagttatttacatatgtcctttcaatggcc |
| | ccattaagggaagagtttacatcacaaattatcgtctttatttaagaagtttggaaacggattcttctctaatacttgatgttcc |
| | tctgggtgtgatctcgagaattgaaaaaatgggaggcgcgacaagtagaggagaaaattcctatggtctagatattacttgt |
| | aaagacatgagaaacctgaggttcgctttgaaacaggaaggccacagcagaagagatatgtttgagatcctcacgagatac |
| | gcgtttcccctggctcacagtctgccattatttgcatttttaaatgaagaaaagtttaacgtggatggatggacagtttacaatc |
| | cagtggaagaatacaggaggcagggcttgcccaatcaccattggagaataacttttattaataagtgctatgagctctgtga |
| | cacttaccctgctcttttggtggttccgtatcgtgcctcagatgatgacctccggagagttgcaacttttaggtcccgaaatcga |
| | attccagtgctgtcatggattcatccagaaaataagacggtcattgtgcgttgcagtcagcctcttgtcggtatgagtgggaa |
| | acgaaataaagatgatgagaaatatctcgatgttatcagggagactaataaacaaatttctaaactcaccatttatgatgca |
| | agacccagcgtaaatgcagtggccaacaaggcaacaggaggaggatatgaaagtgatgatgcatatcataacgccgaact |
| | tttcttcttagacattcataatattcatgttatgcgggaatctttaaaaaaagtgaaggacattgtttatcctaatgtagaagaa |
| | tctcattggttgtccagtttggagtctactcattggttagaacatatcaagctcgttttgacaggagccattcaagtagcagac |
| | aaagtttcttcagggaagagttcagtgcttgtgcattgcagtgacggatgggacaggactgctcagctgacatccttggccat |
| | gctgatgttggatagcttctataggagcattgaagggttcgaaatactggtacaaaaagaatggataagttttggacataaat |
| | ttgcatctcgaataggtcatggtgataaaaaccacaccgatgctgaccgttctcctatttttctccagtttattgattgtgtgtgg |
| | caaatgtcaaaacagttccctacagcttttgaattcaatgaacaatttttgattataattttggatcatctgtatagttgccgatt |
| | tggtactttcttattcaactgtgaatctgctcgagaaagacagaaggttacagaaaggactgtttctttatggtcactgataaa |
| | cagtaataaagaaaaattcaaaaaccccttctatactaaagaaatcaatcgagttttatatccagttgccagtatgcgtcact |
| | tggaactctgggtgaattactacattagatggaaccccaggatcaagcaacaacagccgaatccagtggagcagcgttaca |
| | tggagctcttagccttacgcgacgaatacataaagcggcttgaggaactgcagctcgccaactctgccaagctttctgatccc |
| | ccaacttcaccttccagtccttcgcaaatgatgccccatgtgcaaactcacttttaaTTAAGATCTTTTTCCCTCTGCC |
| | AAAAATTATGGGGACATCATGAAGCCCCTTGAGCATCTGACTTCTGGCTAATAAAGGAAATTTA |
| | TTTTCATTGCAATAGTGTGTTGGAATTTTTTGTGTCTCTCActccctaggaaaaaa |
| SEQ ID | agtgagcgagcgagcgcgcagagagggagtggccaactccatcactaggggttcctTGCGCAcaGGTACCCCTCTA |
| NO: 197 | TAAATACCCGCTCTGGGTTGGCAGCTGTTGCTGCGGTGTGTGTGGGCGTGGGTGGTGTGAGTA |
| (E13C) | GGGGGATGAATCAGGGAGGGGGCGGGGGCAGGGGGCAGGAGCCACACAAACCTGCCCTGG |
| | CGAAGACCCCCGCTGGCTGACTCAGGGATCTTGCAGCTGTCAGGGGGGAGGGATACAAATAG |
| | TGCCGACGGCTGGGGGCCCTGTCTCCCCTCGCCGCGGCCGCCACCatggcttctgcatcaacttctaaat |
| | ataattcacactccttggagaatgagtctattaagaggacgtctcgagatggagtcaatcgagatctcactgaggctgttcct |
| | cgacttccaggagaaacactaatcactgacaaagaagttatttacatatgtcctttcaatggccccattaagggaagagttta |
| | catcacaaattatcgtctttatttaagaagtttggaaacggattcttctctaatacttgatgttcctctgggtgtgatctcgagaa |
| | ttgaaaaaatgggaggcgcgacaagtagaggagaaaattcctatggtctagatattacttgtaaagacatgagaaacctga |
| | ggttcgctttgaaacaggaaggccacagcagaagagatatgtttgagatcctcacgagatacgcgtttcccctggctcacag |
| | tctgccattatttgcatttttaaatgaagaaaagtttaacgtggatggatggacagtttacaatccagtggaagaatacagga |
| | ggcagggcttgcccaatcaccattggagaataacttttattaataagtgctatgagctctgtgacacttaccctgctcttttggt |
| | ggttccgtatcgtgcctcagatgatgacctccggagagttgcaacttttaggtcccgaaatcgaattccagtgctgtcatggat |
| | tcatccagaaaataagacggtcattgtgcgttgcagtcagcctcttgtcggtatgagtgggaaacgaaataaagatgatgag |
| | aaatatctcgatgttatcagggagactaataaacaaatttctaaactcaccatttatgatgcaagacccagcgtaaatgcagt |
| | ggccaacaaggcaacaggaggaggatatgaaagtgatgatgcatatcataacgccgaacttttcttcttagacattcataat |
| | attcatgttatgcgggaatctttaaaaaaagtgaaggacattgtttatcctaatgtagaagaatctcattggttgtccagtttgg |
| | agtctactcattggttagaacatatcaagctcgttttgacaggagccattcaagtagcagacaaagtttcttcagggaagagt |
| | tcagtgcttgtgcattgcagtgacggatgggacaggactgctcagctgacatccttggccatgctgatgttggatagcttctat |
| | aggagcattgaagggttcgaaatactggtacaaaaagaatggataagttttggacataaatttgcatctcgaataggtcatg |
| | gtgataaaaaccacaccgatgctgaccgttctcctatttttctccagtttattgattgtgtgtggcaaatgtcaaaacagttccc |
| | tacagcttttgaattcaatgaacaatttttgattataattttggatcatctgtatagttgccgatttggtactttcttattcaactgt |
| | gaatctgctcgagaaagacagaaggttacagaaaggactgtttctttatggtcactgataaacagtaataaagaaaaattca |
| | aaaaccccttctatactaaagaaatcaatcgagttttatatccagttgccagtatgcgtcacttggaactctgggtgaattact |
| | acattagatggaaccccaggatcaagcaacaacagccgaatccagtggagcagcgttacatggagctcttagccttacgcg |
| | acgaatacataaagcggcttgaggaactgcagctcgccaactctgccaagctttctgatcccccaacttcaccttccagtcctt |
| | cgcaaatgatgccccatgtgcaaactcacttttaaTTAAGATCTTTTTCCCTCTGCCAAAAATTATGGGGACA |
| | TCATGAAGCCCCTTGAGCATCTGACTTCTGGCTAATAAAGGAAATTTATTTTCATTGCAATAGT |
| | GTGTTGGAATTTTTTGTGTCTCTCActcgagGCCTaggaacccctagtgatggagttggccactccctctctgcg |
| | cgctcgctcgctcactgaggccgggcgaccaaaggtcgcccgacgcccgggctttgcccgggcggcctcagtgagcgagcg |
| | agcgcgcagagagggagtggccaa |
| SEQ ID | tttttGtcGACCCTCTATAAATACCCGCTCTGGGTTGGCAGCTGTTGCTGCGGTGTGTGTGGGCGT |
| NO: 198 | GGGTGGTGTGAGTAGGGGGATGAATCAGGGAGGGGGCGGGGGCAGGGGGCAGGAGCCACA |
| (E14) | CAAACCTGCCCTGGCGAAGACCCCCGCTGGCTGACTCAGGGATCTTGCAGCTGTCAGGGGGG |
| | AGGGATACAAATAGTGCCGACGGCTGGGGGCCCTGTCTCCCCTCGCCGCGGCCGCCACCatggc |
| | ttctgcatcaacttctaaatataattcacactccttggagaatgagtctattaagaggacgtctcgagatggagtcaatcgag |
| | atctcactgaggctgttcctcgacttccaggagaaacactaatcactgacaaagaagttatttacatatgtcctttcaatggcc |
| | ccattaagggaagagtttacatcacaaattatcgtctttatttaagaagtttggaaacggattcttctctaatacttgatgttcc |
| | tctgggtgtgatctcgagaattgaaaaaatgggaggcgcgacaagtagaggagaaaattcctatggtctagatattacttgt |
| | aaagacatgagaaacctgaggttcgctttgaaacaggaaggccacagcagaagagatatgtttgagatcctcacgagatac |
| | gcgtttcccctggctcacagtctgccattatttgcatttttaaatgaagaaaagtttaacgtggatggatggacagtttacaatc |
| | cagtggaagaatacaggaggcagggcttgcccaatcaccattggagaataacttttattaataagtgctatgagctctgtga |
| | cacttaccctgctcttttggtggttccgtatcgtgcctcagatgatgacctccggagagttgcaacttttaggtcccgaaatcga |
| | attccagtgctgtcatggattcatccagaaaataagacggtcattgtgcgttgcagtcagcctcttgtcggtatgagtgggaa |
| | acgaaataaagatgatgagaaatatctcgatgttatcagggagactaataaacaaatttctaaactcaccatttatgatgca |
| | agacccagcgtaaatgcagtggccaacaaggcaacaggaggaggatatgaaagtgatgatgcatatcataacgccgaact |
| | tttcttcttagacattcataatattcatgttatgcgggaatctttaaaaaaagtgaaggacattgtttatcctaatgtagaagaa |
| | tctcattggttgtccagtttggagtctactcattggttagaacatatcaagctcgttttgacaggagccattcaagtagcagac |
| | aaagtttcttcagggaagagttcagtgcttgtgcattgcagtgacggatgggacaggactgctcagctgacatccttggccat |
| | gctgatgttggatagcttctataggagcattgaagggttcgaaatactggtacaaaaagaatggataagttttggacataaat |
| | ttgcatctcgaataggtcatggtgataaaaaccacaccgatgctgaccgttctcctatttttctccagtttattgattgtgtgtgg |
| | caaatgtcaaaacagttccctacagcttttgaattcaatgaacaatttttgattataattttggatcatctgtatagttgccgatt |
| | tggtactttcttattcaactgtgaatctgctcgagaaagacagaaggttacagaaaggactgtttctttatggtcactgataaa |
| | cagtaataaagaaaaattcaaaaaccccttctatactaaagaaatcaatcgagttttatatccagttgccagtatgcgtcact |
| | tggaactctgggtgaattactacattagatggaaccccaggatcaagcaacaacagccgaatccagtggagcagcgttaca |
| | tggagctcttagccttacgcgacgaatacataaagcggcttgaggaactgcagctcgccaactctgccaagctttctgatccc |
| | ccaacttcaccttccagtccttcgcaaatgatgccccatgtgcaaactcacttttaaTTAAGATCTTTTTCCCTCTGCC |
| | AAAAATTATGGGGACATCATGAAGCCCCTTGAGCATCTGACTTCTGGCTAATAAAGGAAATTTA |
| | TTTTCATTGCAATAGTGTGTTGGAATTTTTTGTGTCTCTCActccctaggaaaaaa |
| SEQ ID | ttggccactccctctctgcgcgctcgctcgctcactgaggccgcccgggcaaagcccgggcgtcgggcgacctttggtcgccc |
| NO: 199 | ggcctcagtgagcgagcgagcgcgcagagagggagtggccaactccatcactaggggttcctttGtcGACCCTCTATA |
| (E15) | AATACCCGCTCTGGGTTGGCAGCTGTTGCTGCGGTGTGTGTGGGCGTGGGTGGTGTGAGTAG |
| | GGGGATGAATCAGGGAGGGGGCGGGGGCAGGGGGCAGGAGCCACACAAACCTGCCCTGGC |
| | GAAGACCCCCGCTGGCTGACTCAGGGATCTTGCAGCTGTCAGGGGGGAGGGATACAAATAGT |
| | GCCGACGGCTGGGGGCCCTGTCTCCCCTCGCCGCGGCCGCCACCatggcttctgcatcaacttctaaata |
| | taattcacactccttggagaatgagtctattaagaggacgtctcgagatggagtcaatcgagatctcactgaggctgttcctc |
| | gacttccaggagaaacactaatcactgacaaagaagttatttacatatgtcctttcaatggccccattaagggaagagtttac |
| | atcacaaattatcgtctttatttaagaagtttggaaacggattcttctctaatacttgatgttcctctgggtgtgatctcgagaat |
| | tgaaaaaatgggaggcgcgacaagtagaggagaaaattcctatggtctagatattacttgtaaagacatgagaaacctgag |
| | gttcgctttgaaacaggaaggccacagcagaagagatatgtttgagatcctcacgagatacgcgtttcccctggctcacagtc |
| | tgccattatttgcatttttaaatgaagaaaagtttaacgtggatggatggacagtttacaatccagtggaagaatacaggagg |
| | cagggcttgcccaatcaccattggagaataacttttattaataagtgctatgagctctgtgacacttaccctgctcttttggtgg |
| | ttccgtatcgtgcctcagatgatgacctccggagagttgcaacttttaggtcccgaaatcgaattccagtgctgtcatggattc |
| | atccagaaaataagacggtcattgtgcgttgcagtcagcctcttgtcggtatgagtgggaaacgaaataaagatgatgagaa |
| | atatctcgatgttatcagggagactaataaacaaatttctaaactcaccatttatgatgcaagacccagcgtaaatgcagtgg |
| | ccaacaaggcaacaggaggaggatatgaaagtgatgatgcatatcataacgccgaacttttcttcttagacattcataatatt |
| | catgttatgcgggaatctttaaaaaaagtgaaggacattgtttatcctaatgtagaagaatctcattggttgtccagtttggag |
| | tctactcattggttagaacatatcaagctcgttttgacaggagccattcaagtagcagacaaagtttcttcagggaagagttc |
| | agtgcttgtgcattgcagtgacggatgggacaggactgctcagctgacatccttggccatgctgatgttggatagcttctatag |
| | gagcattgaagggttcgaaatactggtacaaaaagaatggataagttttggacataaatttgcatctcgaataggtcatggt |
| | gataaaaaccacaccgatgctgaccgttctcctatttttctccagtttattgattgtgtgtggcaaatgtcaaaacagttcccta |
| | cagcttttgaattcaatgaacaatttttgattataattttggatcatctgtatagttgccgatttggtactttcttattcaactgtg |
| | aatctgctcgagaaagacagaaggttacagaaaggactgtttctttatggtcactgataaacagtaataaagaaaaattcaa |
| | aaaccccttctatactaaagaaatcaatcgagttttatatccagttgccagtatgcgtcacttggaactctgggtgaattacta |
| | cattagatggaaccccaggatcaagcaacaacagccgaatccagtggagcagcgttacatggagctcttagccttacgcga |
| | cgaatacataaagcggcttgaggaactgcagctcgccaactctgccaagctttctgatcccccaacttcaccttccagtccttc |
| | gcaaatgatgccccatgtgcaaactcacttttaaTTAAGATCTTTTTCCCTCTGCCAAAAATTATGGGGACAT |
| | CATGAAGCCCCTTGAGCATCTGACTTCTGGCTAATAAAGGAAATTTATTTTCATTGCAATAGTG |
| | TGTTGGAATTTTTTGTGTCTCTCActcgCctaggccactccctctctgcgcgctcgctcgctcactgaggccgggcg |
| | accaaaggtcgcccgacgcccgggctttgcccgggcggcctcagtgagcgagcgagcgcgcagagagggagtggccaa |
| SEQ ID | ttttGGTACCgacattgattattgactagttattaatagtaatcaattacggggtcattagttcatagcccatatatggagttc |
| NO: 200 | cgcgttacataacttacggtaaatggcccgcctggctgaccgcccaacgacccccgcccattgacgtcaataatgacgtatgt |
| (E16) | tcccatagtaacgccaatagggactttccattgacgtcaatgggtggagtatttacggtaaactgcccacttggcagtacatc |
| | aagtgtatcatatgccaagtacgccccctattgacgtcaatgacggtaaatggcccgcctggcattatgcccagtacatgacc |
| | ttatgggactttcctacttggcagtacatctacgtattagtcatcgctattaccatggtcgaggtgagccccacgttctgcttca |
| | ctctccccatctcccccccctccccacccccaattttgtatttatttattttttaattattttgtgcagcgatgggggcggggggg |
| | gggggggggcgcgcgccaggcggggcggggcggggcgaggggcggggcggggcgaggcggagaggtgcggcggcagc |
| | caatcagagcggcgcgctccgaaagtttccttttatggcgaggcggcggcggcggcggccctataaaaagcgaagcgcgcg |
| | gcgggcggatatctttttt |
| SEQ ID | ttggccactccctctctgcgcgctcgctcgctcactgaggccgcccgggcaaagcccgggcgtcgggcgacctttggtcgccc |
| NO: 201 | ggcctcagtgagcgagcgagcgcgcagagagggagtggccaactccatcactaggggttcctttGTCGACgacattgatt |
| (E17) | attgactagttattaatagtaatcaattacggggtcattagttcatagcccatatatggagttccgcgttacataacttacggta |
| | aatggcccgcctggctgaccgcccaacgacccccgcccattgacgtcaataatgacgtatgttcccatagtaacgccaatag |
| | ggactttccattgacgtcaatgggggagtatttacggtaaactgcccacttggcagtacatcaagtgtatcatatgccaagta |
| | cgccccctattgacgtcaatgacggtaaatggcccgcctggcattatgcccagtacatgaccttatgggactttcctacttggc |
| | agtacatctacgtattagtcatcgctattaccatggtcgaggtgagccccacgttctgcttcactctccccatctcccccccctc |
| | cccacccccaattttgtatttatttattttttaattattttgtgcagcgatgggggcggggggggggggggggcgcgcgccagg |
| | cggggcggggcggggcgaggggcggggggggcgaggcggagaggtgcggcggcagccaatcagagcggcgcgctccg |
| | aaagtttccttttatggcgaggcggcggcggcggcggccctataaaaagcgaagcgcgcggcgggcgggagtGgctgcgc |
| | gctgccttcgccccgtgccccgctccgccgccgcctcgcgccgcccgccccggctctgactgaccgcgttactcccacaggtg |
| | agcgggcgggacggcccttctcctccgggctgtaattagcgcttggtttaatgacggcttgtttcttttctgtggctgcgtgaaa |
| | gccttgaggggctccgggagggccctttgtgcggggggagcggctcggggggtgcgtgcgtgtgtgtgtgcgtggggagcgc |
| | cgcgtgcggctccgcgctgcccggcggctgtgagcgctgcgggcgcggcgcggggctttgtgcgctccgcagtgtgcgcgag |
| | gggagcgcggccgggggcggtgccccgcggtgcggggggggctgcgaggggaacaaaggctgcgtgcggggtgtgtgcgt |
| | gggggggtgagcagggggtgtgggcgcgtcggtcgggctgcaaccccccctgcacccccctccccgagttgctgagcacgg |
| | cccggcttcgggtgcggggctccgtacggggcgtggcgcggggctcgccgtgccgggcggggggggcggcaggtgggggt |
| | gccgggcggggcggggccgcctcgggccggggagggctcgggggaggggcgcggcggcccccggagcgccggcggctgt |
| | cgaggcgcggcgagccgcagccattgccttttatggtaatcgtgcgagagggcgcagggacttcctttgtcccaaatctgtgc |
| | ggagccgaaatctgggaggcgccgccgcaccccctctagcgggcgcggggcgaagcggtgcggcgccggcaggaaggaa |
| | atgggggggagggccttcgtgcgtcgccgcgccgccgtccccttctccctctccagcctcggggctgtccgcggggggacgg |
| | ctgccttcgggggggacggggcagggcggggttcggcttctggcgtgtgaccggcggctctagagcctctgctaaccatgttc |
| | atgccttcttctttttcctacagctcctgggcaacgtgctggttattgtgctgtctcatcattttggcaaaAGATCTgccgccac |
| | catggtgagcaagggcgaggagctgttcaccggggtggtgcccatcctggtcgagctggacggcgacgtaaacggccacaa |
| | gttcagcgtgtccggcgagggcgagggcgatgccacctacggcaagctgaccctgaagttcatctgcaccaccggcaagct |
| | gcccgtgccctggcccaccctcgtgaccaccctgacctacggcgtgcagtgcttcagccgctaccccgaccacatgaagcag |
| | cacgacttcttcaagtccgccatgcccgaaggctacgtccaggagcgcaccatcttcttcaaggacgacggcaactacaaga |
| | cccgcgccgaggtgaagttcgagggcgacaccctggtgaaccgcatcgagctgaagggcatcgacttcaaggaggacggc |
| | aacatcctggggcacaagctggagtacaactacaacagccacaacgtctatatcatggccgacaagcagaagaacggcat |
| | caaggtgaacttcaagatccgccacaacatcgaggacggcagcgtgcagctcgccgaccactaccagcagaacacccccat |
| | cggcgacggccccgtgctgctgcccgacaaccactacctgagcacccagtccgccctgagcaaagaccccaacgagaagc |
| | gcgatcacatggtcctgctggagttcgtgaccgccgccgggatcactctcggcatggacgagctgtacaagTGAGAGCT |
| | Cgatctttttccctctgccaaaaattatggggacatcatgaagccccttgagcatctgacttctggctaataaaggaaatttat |
| | tttcattgcaatagtgtgttggaattttttgtgtctctcactcggaagcctagGaggaacccctagtgatggagttggccactcc |
| | ctctctgcgcgctcgctcgctcactgaggccgggcgaccaaaggtcgcccgacgcccgggctttgcccgggcggcctcagtg |
| | agcgagcgagcgcgcagagagggagtggccaa |
| SEQ ID | CAAAGAATTTGAGCGGCCGCCACCATGGCTTCTGCATCAACTTCTAAATATAATTCACACTCCTT |
| NO: 202 | GGAGAATGAGTCTATTAAGAGGACGTCTCGAGATGGAGTCAATCGAGATCTCACTGAGGCTGT |
| (E18) | TCCTCGACTTCCAGGAGAAACACTAATCACTGACAAAGAAGTTATTTACATATGTCCTTTCAATG |
| | GCCCCATTAAGGGAAGAGTTTACATCACAAATTATCGTCTTTATTTAAGAAGTTTGGAAACGGA |
| | TTCTTCTCTAATACTTGATGTTCCTCTGGGTGTGATCTCGAGAATTGAAAAAATGGGAGGCGCG |
| | ACAAGTAGAGGAGAAAATTCCTATGGTCTAGATATTACTTGTAAAGACATGAGAAACCTGAGG |
| | TTCGCTTTGAAACAGGAAGGCCACAGCAGAAGAGATATGTTTGAGATCCTCACGAGATACGCG |
| | TTTCCCCTGGCTCACAGTCTGCCATTATTTGCATTTTTAAATGAAGAAAAGTTTAACGTGGATGG |
| | ATGGACAGTTTACAATCCAGTGGAAGAATACAGGAGGCAGGGCTTGCCCAATCACCATTGGA |
| | GAATAACTTTTATTAATAAGTGCTATGAGCTCTGTGACACTTACCCTGCTCTTTTGGTGGTTCCG |
| | TATCGTGCCTCAGATGATGACCTCCGGAGAGTTGCAACTTTTAGGTCCCGAAATCGAATTCCAG |
| | TGCTGTCATGGATTCATCCAGAAAATAAGACGGTCATTGTGCGTTGCAGTCAGCCTCTTGTCGG |
| | TATGAGTGGGAAACGAAATAAAGATGATGAGAAATATCTCGATGTTATCAGGGAGACTAATA |
| | AACAAATTTCTAAACTCACCATTTATGATGCAAGACCCAGCGTAAATGCAGTGGCCAACAAGG |
| | CAACAGGAGGAGGATATGAAAGTGATGATGCATATCATAACGCCGAACTTTTCTTCTTAGACA |
| | TTCATAATATTCATGTTATGCGGGAATCTTTAAAAAAAGTGAAGGACATTGTTTATCCTAATGTA |
| | GAAGAATCTCATTGGTTGTCCAGTTTGGAGTCTACTCATTGGTTAGAACATATCAAGCTCGTTTT |
| | GACAGGAGCCATTCAAGTAGCAGACAAAGTTTCTTCAGGGAAGAGTTCAGTGCTTGTGCATTG |
| | CAGTGACGGATGGGACAGGACTGCTCAGCTGACATCCTTGGCCATGCTGATGTTGGATAGCTT |
| | CTATAGGAGCATTGAAGGGTTCGAAATACTGGTACAAAAAGAATGGATAAGTTTTGGACATAA |
| | ATTTGCATCTCGAATAGGTCATGGTGATAAAAACCACACCGATGCTGACCGTTCTCCTATTTTTC |
| | TCCAGTTTATTGATTGTGTGTGGCAAATGTCAAAACAGTTCCCTACAGCTTTTGAATTCAATGAA |
| | CAATTTTTGATTATAATTTTGGATCATCTGTATAGTTGCCGATTTGGTACTTTCTTATTCAACTGT |
| | GAATCTGCTCGAGAAAGACAGAAGGTTACAGAAAGGACTGTTTCTTTATGGTCACTGATAAAC |
| | AGTAATAAAGAAAAATTCAAAAACCCCTTCTATACTAAAGAAATCAATCGAGTTTTATATCCAG |
| | TTGCCAGTATGCGTCACTTGGAACTCTGGGTGAATTACTACATTAGATGGAACCCCAGGATCAA |
| | GCAACAACAGCCGAATCCAGTGGAGCAGCGTTACATGGAGCTCTTAGCCTTACGCGACGAATA |
| | CATAAAGCGGCTTGAGGAACTGCAGCTCGCCAACTCTGCCAAGCTTTCTGATCCCCCAACTTCA |
| | CCTTCCAGTCCTTCGCAAATGATGCCCCATGTGCAAACTCACTTTTAATTAAGATCTTTTT |
| SEQ ID | TTTGAGCGGCCGCCACCatggcttctgcatcaacttctaaatataattcacactccttggagaatgagtctattaagag |
| NO: 203 | gacgtctcgagatggagtcaatcgagatctcactgaggctgttcctcgacttccaggagaaacactaatcactgacaaagaa |
| (E19) | gttatttacatatgtcctttcaatggccccattaagggaagagtttacatcacaaattatcgtctttatttaagaagtttggaaa |
| | cggattcttctctaatacttgatgttcctctgggtgtgatctcgagaattgaaaaaatgggaggcgcgacaagtagaggagaa |
| | aattcctatggtctagatattacttgtaaagacatgagaaacctgaggttcgctttgaaacaggaaggccacagcagaagag |
| | atatgtttgagatcctcacgagatacgcgtttcccctggctcacagtctgccattatttgcatttttaaatgaagaaaagtttaa |
| | cgtggatggatggacagtttacaatccagtggaagaatacaggaggcagggcttgcccaatcaccattggagaataactttt |
| | attaataagtgctatgagctctgtgacacttaccctgctcttttggtggttccgtatcgtgcctcagatgatgacctccggagag |
| | ttgcaacttttaggtcccgaaatcgaattccagtgctgtcatggattcatccagaaaataagacggtcattgtgcgttgcagtc |
| | agcctcttgtcggtatgagtgggaaacgaaataaagatgatgagaaatatctcgatgttatcagggagactaataaacaaat |
| | ttctaaactcaccatttatgatgcaagacccagcgtaaatgcagtggccaacaaggcaacaggaggaggatatgaaagtga |
| | tgatgcatatcataacgccgaacttttcttcttagacattcataatattcatgttatgcgggaatctttaaaaaaagtgaagga |
| | cattgtttatcctaatgtagaagaatctcattggttgtccagtttggagtctactcattggttagaacatatcaagctcgttttga |
| | caggagccattcaagtagcagacaaagtttcttcagggaagagttcagtgcttgtgcattgcagtgacggatgggacaggac |
| | tgctcagctgacatccttggccatgctgatgttggatagcttctataggagcattgaagggttcgaaatactggtacaaaaag |
| | aatggataagttttggacataaatttgcatctcgaataggtcatggtgataaaaaccacaccgatgctgaccgttctcctattt |
| | ttctccagtttattgattgtgtgtggcaaatgtcaaaacagttccctacagcttttgaattcaatgaacaatttttgattataattt |
| | tggatcatctgtatagttgccgatttggtactttcttattcaactgtgaatctgctcgagaaagacagaaggttacagaaagga |
| | ctgtttctttatggtcactgataaacagtaataaagaaaaattcaaaaaccccttctatactaaagaaatcaatcgagttttat |
| | atccagttgccagtatgcgtcacttggaactctgggtgaattactacattagatggaaccccaggatcaagcaacaacagcc |
| | gaatccagtggagcagcgttacatggagctcttagccttacgcgacgaatacataaagcggcttgaggaactgcagctcgcc |
| | aactctgccaagctttctgatcccccaacttcaccttccagtccttcgcaaatgatgcCCCATGTGCAAACTCACTTTT |
| | AATTAAGATC |
| SEQ ID | ttggccactccctctctgcgcgctcgctcgctcactgaggccgcccgggcaaagcccgggcgtcgggcgacctttggtcgccc |
| NO: 204 | ggcctcagtgagcgagcgagcgcgcagagagggagtggccaactccatcactaggggttcctTGCGCAcaggtaccccc |
| (E20A) | ctgcccccacagctcctctcctgtgccttgtttcccagccatgcgttctcctctataaatacccgctctggtatttggggttggca |
| | gctgttgctgccagggagatggttgggttgacatgcggctcctgacaaaacacaaacccctggtgtgtgtgggcgtgggtggt |
| | gtgagtagggggatgaatcaggggggggcgggggacccagggggcaggagccacacaaagtctgtgcggggggggag |
| | cgcacatagcaattggaaactggctgcagacatgcttgctgcctgccctggcgaaggattggtaggcttgccgtcacaggac |
| | ccccgctggctgactcaggggcgcaggctcttgcgggggagctggcctcccgcccccacggccacgggccctttcctggcag |
| | gacagcgggatcttgcagctgtcaggggaggggaggcgggggctgatgtcaggagggatacaaatagtgccgacggctgg |
| | gggccctgtctcccctcgccgcatccactctccggccggccgcctgcccgccgcctcctccgtgcgcccgccagcctcgcccgc |
| | gccgtcaccGATATCtcagatcgcctggagacgccatccacgctgttttgacctccatagaagacaccgggaccgatcca |
| | gcctccgcggattcgaatcccggccgggaacggtgcattggaacgcggattccccgtgccaagagtgacgtaagtaccgcct |
| | atagagtctataggcccacaaaaaatgctttcttcttttaatatacttttttgtttatcttatttctaatactttccctaatctctttc |
| | tttcagggcaataatgatacaatgtatcatgcctctttgcaccattctaaagaataacagtgataatttctgggttaaggcaat |
| | agcaatatttctgcatataaatatttctgcatataaattgtaactgatgtaagaggtttcatattgctaatagcagctacaatcc |
| | agctaccattctgcttttattttatggttgggataaggctggattattctgagtccaagctaggcccttttgctaatcatgttcat |
| | acctcttatcttcctcccacagctcctgggcaacgtgctggtctgtgtgctggcccatcactttggcaaagaattGGATCCgc |
| | cgccacc |
| SEQ ID | taaGTCGACGTAAGTTTTTAAATGTATAAATTGTCTTATttataaATTGGTCTAAAATATATGTAATt |
| NO: 205 | GTCTTAAgatctttttccctctgccaaaaattatggggacatcatgaagccccttgagcatctgacttctggctaataaagg |
| (E20B) | aaatttattttcattgcaatagtgtgttggaattttttgtgtctctcactcgagGCCTaggaacccctagtgatggagttggcc |
| | actccctctctgcgcgctcgctcgctcactgaggccgggcgaccaaaggtcgcccgacgcccgggctttgcccgggcggcctc |
| | agtgagcgagcgagcgcgcagagagggagtggccaa |
| SEQ ID | ttggccactccctctctgcgcgctcgctcgctcactgaggccgcccgggcaaagcccgggcgtcgggcgacctttggtcgccc |
| NO: 206 | ggcctcagtgagcgagcgagcgcgcagagagggagtggccaactccatcactaggggttcctttgtcGACTCGGTTCG |
| (E21A) | CATATTAAGGTGACGCGTGTGGCCTCGAACACCGAGCGACCCTGCAGCGACCCGCTTAA |
| SEQ ID | AATAAAGGAAATTTATTTTCATTGCAATAGTGTGTTGGAATTTTTTGTGTCTCTCAGAGTCctagg |
| NO: 207 | ccactccctctctgcgcgctcgctcgctcactgaggccgggcgaccaaaggtcgcccgacgcccgggctttgcccgggcggc |
| (E21B) | ctcagtgagcgagcgagcgcgcagagagggagtggccaa |
| SEQ ID | ttggccactccctctctgcgcgctcgctcgctcactgaggccgcccgggcaaagcccgggcgtcgggcgacctttggtcgccc |
| NO: 208 | ggcctcagtgagcgagcgagcgcgcagagagggagtggccaactccatcactaggggttcctttGtcGACTTCGCATA |
| (E22) | TTAAGGTGACGCGTGTGGCCTCGAACACCGAGCGACCCTGCAGCGACCCGCTTAAGCGGCCGC |
| | CACCatggcttctgcatcaacttctaaatataattcacactccttggagaatgagtctattaagaggacgtctcgagatgga |
| | gtcaatcgagatctcactgaggctgttcctcgacttccaggagaaacactaatcactgacaaagaagttatttacatatgtcct |
| | ttcaatggccccattaagggaagagtttacatcacaaattatcgtctttatttaagaagtttggaaacggattcttctctaatac |
| | ttgatgttcctctgggtgtgatctcgagaattgaaaaaatgggaggcgcgacaagtagaggagaaaattcctatggtctaga |
| | tattacttgtaaagacatgagaaacctgaggttcgctttgaaacaggaaggccacagcagaagagatatgtttgagatcctc |
| | acgagatacgcgtttcccctggctcacagtctgccattatttgcatttttaaatgaagaaaagtttaacgtggatggatggaca |
| | gtttacaatccagtggaagaatacaggaggcagggcttgcccaatcaccattggagaataacttttattaataagtgctatga |
| | gctctgtgacacttaccctgctcttttggtggttccgtatcgtgcctcagatgatgacctccggagagttgcaacttttaggtccc |
| | gaaatcgaattccagtgctgtcatggattcatccagaaaataagacggtcattgtgcgttgcagtcagcctcttgtcggtatga |
| | gtgggaaacgaaataaagatgatgagaaatatctcgatgttatcagggagactaataaacaaatttctaaactcaccattta |
| | tgatgcaagacccagcgtaaatgcagtggccaacaaggcaacaggaggaggatatgaaagtgatgatgcatatcataacg |
| | ccgaacttttcttcttagacattcataatattcatgttatgcgggaatctttaaaaaaagtgaaggacattgtttatcctaatgt |
| | agaagaatctcattggttgtccagtttggagtctactcattggttagaacatatcaagctcgttttgacaggagccattcaagt |
| | agcagacaaagtttcttcagggaagagttcagtgcttgtgcattgcagtgacggatgggacaggactgctcagctgacatcc |
| | ttggccatgctgatgttggatagcttctataggagcattgaagggttcgaaatactggtacaaaaagaatggataagttttgg |
| | acataaatttgcatctcgaataggtcatggtgataaaaaccacaccgatgctgaccgttctcctatttttctccagtttattgat |
| | tgtgtgtggcaaatgtcaaaacagttccctacagcttttgaattcaatgaacaatttttgattataattttggatcatctgtatag |
| | ttgccgatttggtactttcttattcaactgtgaatctgctcgagaaagacagaaggttacagaaaggactgtttctttatggtca |
| | ctgataaacagtaataaagaaaaattcaaaaaccccttctatactaaagaaatcaatcgagttttatatccagttgccagtat |
| | gcgtcacttggaactctgggtgaattactacattagatggaaccccaggatcaagcaacaacagccgaatccagtggagca |
| | gcgttacatggagctcttagccttacgcgacgaatacataaagcggcttgaggaactgcagctcgccaactctgccaagcttt |
| | ctgatcccccaacttcaccttccagtccttcgcaaatgatgccccatgtgcaaactcacttttaaTTAAGATCTTTTTCCC |
| | TCTGCCAAAAATTATGGGGACATCATGAAGCCCCTTGAGCATCTGACTTCTGGCTAATAAAGGA |
| | AATTTATTTTCATTGCAATAGTGTGTTGGAATTTTTTGTGTCTCTCActccctaggccactccctctctgcg |
| | cgctcgctcgctcactgaggccgggcgaccaaaggtcgcccgacgcccgggctttgcccgggcggcctcagtgagcgagcg |
| | agcgcgcagagagggagtggccaa |
| SEQ ID | ttttGGTACCgacattgattattgactagttatt |
| NO: 209 | |
| SEQ ID | aaaaaa gatatc cgcccgccgcgc |
| NO: 210 | |
| SEQ ID | TttttGtcGACTTCGCATATTAAGGTGACGCGT |
| NO: 211 | |
| SEQ ID | tttttt cctagg gagTGAGAGACACAAAAAATTCCAACACAC |
| NO: 212 | |
| SEQ ID | tttttGtcGACCCTCTATAAATACCCGCTCTGG |
| NO: 213 | |
| SEQ ID | tttttt cctagg gagTGAGAGACACAAAAAATTCCAACACAC |
| NO: 214 | |

The application's sequence listing, which the Patent Office published only in electronic form, follows.

SEQUENCE LISTING (237 sequences)

SEQ ID NO: 1 - protein, 7 aa, Artificial Sequence
  Description of Artificial Sequence: Synthetic peptide
RGDLLLS

SEQ ID NO: 2 - protein, 11 aa, Artificial Sequence
  Description of Artificial Sequence: Synthetic peptide
AQTLAWPFKAQ

SEQ ID NO: 3 - protein, 11 aa, Artificial Sequence
  Description of Artificial Sequence: Synthetic peptide
AQSWSKPFLAQ

SEQ ID NO: 4 - protein, 11 aa, Artificial Sequence
  Description of Artificial Sequence: Synthetic peptide
  MOD_RES (11)..(11): Any amino acid
DGTLAVPFKAX

SEQ ID NO: 5 - protein, 11 aa, Artificial Sequence
  Description of Artificial Sequence: Synthetic peptide
  MOD_RES (11)..(11): Any amino acid
ESTLAVPFKAX

SEQ ID NO: 6 - protein, 11 aa, Artificial Sequence
  Description of Artificial Sequence: Synthetic peptide
  MOD_RES (11)..(11): Any amino acid
ESTLAVPFKAX

SEQ ID NO: 7 - protein, 11 aa, Artificial Sequence
  Description of Artificial Sequence: Synthetic peptide
GGTLAVPFKAQ

SEQ ID NO: 8 - protein, 11 aa, Artificial Sequence
  Description of Artificial Sequence: Synthetic peptide
AQTLATPFKAQ

SEQ ID NO: 9 - protein, 11 aa, Artificial Sequence
  Description of Artificial Sequence: Synthetic peptide
  MOD_RES (11)..(11): Any amino acid
ATTLATPFKAX

SEQ ID NO: 10 - protein, 11 aa, Artificial Sequence
  Description of Artificial Sequence: Synthetic peptide
  MOD_RES (11)..(11): Any amino acid
DGTLATPFKAX

SEQ ID NO: 11 - protein, 11 aa, Artificial Sequence
  Description of Artificial Sequence: Synthetic peptide
GGTLATPFKAQ

SEQ ID NO: 12 - protein, 11 aa, Artificial Sequence
  Description of Artificial Sequence: Synthetic peptide
SGSLAWPFKAQ

SEQ ID NO: 13 - protein, 11 aa, Artificial Sequence
  Description of Artificial Sequence: Synthetic peptide
AQTLAQPFKAQ

SEQ ID NO: 14 - protein, 11 aa, Artificial Sequence
  Description of Artificial Sequence: Synthetic peptide
AQTLQQPFKAQ

SEQ ID NO: 15 - protein, 11 aa, Artificial Sequence
  Description of Artificial Sequence: Synthetic peptide
AQTLSNPFKAQ

SEQ ID NO: 16 - protein, 11 aa, Artificial Sequence
  Description of Artificial Sequence: Synthetic peptide
  MOD_RES (2)..(2): Any amino acid
AXTLAVPFSNP

SEQ ID NO: 17 - protein, 11 aa, Artificial Sequence
  Description of Artificial Sequence: Synthetic peptide
QGTLAVPFKAQ

SEQ ID NO: 18 - protein, 11 aa, Artificial Sequence
  Description of Artificial Sequence: Synthetic peptide
NQTLAVPFKAQ

SEQ ID NO: 19 - protein, 11 aa, Artificial Sequence
  Description of Artificial Sequence: Synthetic peptide
EGSLAVPFKAQ

SEQ ID NO: 20 - protein, 11 aa, Artificial Sequence
  Description of Artificial Sequence: Synthetic peptide
SGNLAVPFKAQ

SEQ ID NO: 21 - protein, 11 aa, Artificial Sequence
  Description of Artificial Sequence: Synthetic peptide
EGTLAVPFKAQ

SEQ ID NO: 22 - protein, 11 aa, Artificial Sequence
  Description of Artificial Sequence: Synthetic peptide
DSTLAVPFKAQ

SEQ ID NO: 23 - protein, 11 aa, Artificial Sequence
  Description of Artificial Sequence: Synthetic peptide
AVTLAVPFKAQ

SEQ ID NO: 24 - protein, 11 aa, Artificial Sequence
  Description of Artificial Sequence: Synthetic peptide
AQTLSTPFKAQ

SEQ ID NO: 25 - protein, 11 aa, Artificial Sequence
  Description of Artificial Sequence: Synthetic peptide
AQTLPQPFKAQ

SEQ ID NO: 26 - protein, 11 aa, Artificial Sequence
  Description of Artificial Sequence: Synthetic peptide
AQTLSQPFKAQ

SEQ ID NO: 27 - protein, 11 aa, Artificial Sequence
  Description of Artificial Sequence: Synthetic peptide
AQTLQLPFKAQ

SEQ ID NO: 28 - protein, 11 aa, Artificial Sequence
  Description of Artificial Sequence: Synthetic peptide
AQTLTMPFKAQ

SEQ ID NO: 29 - protein, 11 aa, Artificial Sequence
  Description of Artificial Sequence: Synthetic peptide
AQTLTTPFKAQ

SEQ ID NO: 30 - protein, 11 aa, Artificial Sequence
  Description of Artificial Sequence: Synthetic peptide
AQYTLSQGWAQ

SEQ ID NO: 31 - protein, 11 aa, Artificial Sequence
  Description of Artificial Sequence: Synthetic peptide
AQMNATKNVAQ

SEQ ID NO: 32 - protein, 11 aa, Artificial Sequence
  Description of Artificial Sequence: Synthetic peptide
AQVSGGHHSAQ

SEQ ID NO: 33 - protein, 11 aa, Artificial Sequence
  Description of Artificial Sequence: Synthetic peptide
AQTLPQPFKAQ

SEQ ID NO: 34 - protein, 11 aa, Artificial Sequence
  Description of Artificial Sequence: Synthetic peptide
AQTLATPFKAQ

SEQ ID NO: 35 - protein, 11 aa, Artificial Sequence
  Description of Artificial Sequence: Synthetic peptide
AQTLTMPFKAQ

SEQ ID NO: 36 - protein, 11 aa, Artificial Sequence
  Description of Artificial Sequence: Synthetic peptide
AQTLTAPFKAQ

SEQ ID NO: 37 - protein, 11 aa, Artificial Sequence
  Description of Artificial Sequence: Synthetic peptide
AQTLSKPFKAQ

SEQ ID NO: 38 - protein, 7 aa, Artificial Sequence
  Description of Artificial Sequence: Synthetic peptide
QAVRTSL

SEQ ID NO: 39 - protein, 7 aa, Artificial Sequence
  Description of Artificial Sequence: Synthetic peptide
YTLSQGW

SEQ ID NO: 40 - protein, 7 aa, Artificial Sequence
  Description of Artificial Sequence: Synthetic peptide
LAKERLS

SEQ ID NO: 41 - protein, 7 aa, Artificial Sequence
  Description of Artificial Sequence: Synthetic peptide
LAKERLS

SEQ ID NO: 42 - protein, 7 aa, Artificial Sequence
  Description of Artificial Sequence: Synthetic peptide
SVSKPFL

SEQ ID NO: 43 - protein, 7 aa, Artificial Sequence
  Description of Artificial Sequence: Synthetic peptide
FTLTTPK

SEQ ID NO: 44 - protein, 7 aa, Artificial Sequence
  Description of Artificial Sequence: Synthetic peptide
MNSTKNV

SEQ ID NO: 45 - protein, 7 aa, Artificial Sequence
  Description of Artificial Sequence: Synthetic peptide
VSGGHHS

SEQ ID NO: 46 - protein, 14 aa, Artificial Sequence
  Description of Artificial Sequence: Synthetic peptide
SAQTLAVPFKAQAQ

SEQ ID NO: 47 - protein, 14 aa, Artificial Sequence
  Description of Artificial Sequence: Synthetic peptide
  MOD_RES (2)..(4): Any amino acid
SXXXLAVPFKAQAQ

SEQ ID NO: 48 - protein, 14 aa, Artificial Sequence
  Description of Artificial Sequence: Synthetic peptide
  MOD_RES (4)..(6): Any amino acid
SAQXXXVPFKAQAQ

SEQ ID NO: 49 - protein, 14 aa, Artificial Sequence
  Description of Artificial Sequence: Synthetic peptide
  MOD_RES (6)..(8): Any amino acid
SAQTLXXXFKAQAQ

SEQ ID NO: 50 - protein, 14 aa, Artificial Sequence
  Description of Artificial Sequence: Synthetic peptide
  MOD_RES (8)..(10): Any amino acid
SAQTLAVXXXAQAQ

SEQ ID NO: 51 - protein, 14 aa, Artificial Sequence
  Description of Artificial Sequence: Synthetic peptide
  MOD_RES (10)..(12): Any amino acid
SAQTLAVPFXXXAQ

SEQ ID NO: 52 - protein, 7 aa, Artificial Sequence
  Description of Artificial Sequence: Synthetic peptide
  MOD_RES (4)..(7): Any amino acid
  See specification as filed for detailed description of substitutions and preferred embodiments
RGDXXXX

SEQ ID NO: 53 - protein, 7 aa, Artificial Sequence
  Description of Artificial Sequence: Synthetic peptide
TLAVPFK

SEQ ID NO: 54 - protein, 736 aa, Adeno-associated virus 1
MAADGYLPDWLEDNLSEGIREWWDLKPGAPKPKANQQKQDDGRGLVLPGYKYLGPFNGLDKGEPVNAADAAALEHDKAYDQQLKAGDNPYLRYNHADAEFQERLQEDTSFGGNLGRAVFQAKKRVLEPLGLVEEGAKTAPGKKRPVEQSPQEPDSSSGIGKTGQQPAKKRLNFGQTGDSESVPDPQPLGEPPATPAAVGPTTMASGGGAPMADNNEGADGVGNASGNWHCDSTWLGDRVITTSTRTWALPTYNNHLYKQISSASTGASNDNHYFGYSTPWGYFDFNRFHCHFSPRDWQRLINNNWGFRPKRLNFKLFNIQVKEVTTNDGVTTIANNLTSTVQVFSDSEYQLPYVLGSAHQGCLPPFPADVFMIPQYGYLTLNNGSQAVGRSSFYCLEYFPSQMLRTGNNFTFSYTFEEVPFHSSYAHSQSLDRLMNPLIDQYLYYLNRTQNQSGSAQNKDLLFSRGSPAGMSVQPKNWLPGPCYRQQRVSKTKTDNNNSNFTWTGASKYNLNGRESIINPGTAMASHKDDEDKFFPMSGVMIFGKESAGASNTALDNVMITDEEEIKATNPVATERFGTVAVNFQSSSTDPATGDVHAMGALPGMVWQDRDVYLQGPIWAKIPHTDGHFHPSPLMGGFGLKNPPPQILIKNTPVPANPPAEFSATKFASFITQYSTGQVSVEIEWELQKENSKRWNPEVQYTSNYAKSANVDFTVDNNGLYTEPRPIGTRYLTRPL

SEQ ID NO: 55 - protein, 735 aa, Adeno-associated virus 2 [sequence omitted]

SEQ ID NO: 56 - protein, 736 aa, Adeno-associated virus 3
MAADGYLPDWLEDNLSEGIREWWALKPGVPQPKANQQHQDNRRGLVLPGYKYLGPGNGLDKGEPVNEADAAALEHDKAYDQQLKAGDNPYLKYNHADAEFQERLQEDTSFGGNLGRAVFQAKKRILEPLGLVEEAAKTAPGKKGAVDQSPQEPDSSSGVGKSGKQPARKRLNFGQTGDSESVPDPQPLGEPPAAPTSLGSNTMASGGGAPMADNNEGADGVGNSSGNWHCDSQWLGDRVITTSTRTWALPTYNNHLYKQISSQSGASNDNHYFGYSTPWGYFDFNRFHCHFSPRDWQRLINNNWGFRPKKLSFKLFNIQVRGVTQNDGTTTIANNLTSTVQVFTDSEYQLPYVLGSAHQGCLPPFPADVFMVPQYGYLTLNNGSQAVGRSSFYCLEYFPSQMLRTGNNFQFSYTFEDVPFHSSYAHSQSLDRLMNPLIDQYLYYLNRTQGTTSGTTNQSRLLFSQAGPQSMSLQARNWLPGPCYRQQRLSKTANDNNNSNFPWTAASKYHLNGRDSLVNPGPAMASHKDDEEKFFPMHGNLIFGKEGTTASNAELDNVMITDEEEIRTTNPVATEQYGTVANNLQSSNTAPTTGTVNHQGALPGMVWQDRDVYLQGPIWAKIPHTDGHFHPSPLMGGFGLKHPPPQIMIKNTPVPANPPTTFSPAKFASFITQYSTGQVSVEIEWELQKENSKRWNPEIQYTSNYNKSVNVDFTVDTNGVYSEPRPIGTRYLTRNL

SEQ ID NO: 57 - protein, 724 aa, Adeno-associated virus 5
MSFVDHPPDWLEEVGEGLREFLGLEAGPPKPKPNQQHQDQARGLVLPGYNYLGPGNGLDRGEPVNRADEVAREHDISYNEQLEAGDNPYLKYNHADAEFQEKLADDTSFGGNLGKAVFQAKKRVLEPFGLVEEGAKTAPTGKRIDDHFPKRKKARTEEDSKPSTSSDAEAGPSGSQQLQIPAQPASSLGADTMSAGGGGPLGDNNQGADGVGNASGDWHCDSTWMGDRVVTKSTRTWVLPSYNNHQYREIKSGSVDGSNANAYFGYSTPWGYFDFNRFHSHWSPRDWQRLINNYWGFRPRSLRVKIFNIQVKEVTVQDSTTTIANNLTSTVQVFTDDDYQLPYVVGNGTEGCLPAFPPQVFTLPQYGYATLNRDNTENPTERSSFFCLEYFPSKMLRTGNNFEFTYNFEEVPFHSSFAPSQNLFKLANPLVDQYLYRFVSTNNTGGVQFNKNLAGRYANTYKNWFPGPMGRTQGWNLGSGVNRASVSAFATTNRMELEGASYQVPPQPNGMTNNLQGSNTYALENTMIFNSQPANPGTTATYLEGNMLITSESETQPVNRVAYNVGGQMATNNQSSTTAPATGTYNLQEIVPGSVWMERDVYLQGPIWAKIPETGAHFHPSPAMGGFGLKHPPPMMLIKNTPVPGNITSFSDVPVSSFITQYSTGQVTVEMEWELKKENSKRWNPEIQYTNNYNDPQFVDFAPDSTGEYRTTRPIGTRYLTRPL

SEQ ID NO: 58 - protein, 736 aa, Adeno-associated virus 6
MAADGYLPDWLEDNLSEGIREWWDLKPGAPKPKANQQKQDDGRGLVLPGYKYLGPFNGLDKGEPVNAADAAALEHDKAYDQQLKAGDNPYLRYNHADAEFQERLQEDTSFGGNLGRAVFQAKKRVLEPFGLVEEGAKTAPGKKRPVEQSPQEPDSSSGIGKTGQQPAKKRLNFGQTGDSESVPDPQPLGEPPATPAAVGPTTMASGGGAPMADNNEGADGVGNASGNWHCDSTWLGDRVITTSTRTWALPTYNNHLYKQISSASTGASNDNHYFGYSTPWGYFDFNRFHCHFSPRDWQRLINNNWGFRPKRLNFKLFNIQVKEVTTNDGVTTIANNLTSTVQVFSDSEYQLPYVLGSAHQGCLPPFPADVFMIPQYGYLTLNNGSQAVGRSSFYCLEYFPSQMLRTGNNFTFSYTFEDVPFHSSYAHSQSLDRLMNPLIDQYLYYLNRTQNQSGSAQNKDLLFSRGSPAGMSVQPKNWLPGPCYRQQRVSKTKTDNNNSNFTWTGASKYNLNGRESIINPGTAMASHKDDKDKFFPMSGVMIFGKESAGASNTALDNVMITDEEEIKATNPVATERFGTVAVNLQSSSTDPATGDVHVMGALPGMVWQDRDVYLQGPIWAKIPHTDGHFHPSPLMGGFGLKHPPPQILIKNTPVPANPPAEFSATKFASFITQYSTGQVSVEIEWELQKENSKRWNPEVQYTSNYAKSANVDFTVDNNGLYTEPRPIGTRYLTRPL

SEQ ID NO: 59 - protein, 737 aa, Adeno-associated virus 7
MAADGYLPDWLEDNLSEGIREWWDLKPGAPKPKANQQKQDNGRGLVLPGYKYLGPFNGLDKGEPVNAADAAALEHDKAYDQQLKAGDNPYLRYNHADAEFQERLQEDTSFGGNLGRAVFQAKKRVLEPLGLVEEGAKTAPAKKRPVEPSPQRSPDSSTGIGKKGQQPARKRLNFGQTGDSESVPDPQPLGEPPAAPSSVGSGTVAAGGGAPMADNNEGADGVGNASGNWHCDSTWLGDRVITTSTRTWALPTYNNHLYKQISSETAGSTNDNTYFGYSTPWGYFDFNRFHCHFSPRDWQRLINNNWGFRPKKLRFKLFNIQVKEVTTNDGVTTIANNLTSTIQVFSDSEYQLPYVLGSAHQGCLPPFPADVFMIPQYGYLTLNNGSQSVGRSSFYCLEYFPSQMLRTGNNFEFSYSFEDVPFHSSYAHSQSLDRLMNPLIDQYLYYLARTQSNPGGTAGNRELQFYQGGPSTMAEQAKNWLPGPCFRQQRVSKTLDQNNNSNFAWTGATKYHLNGRNSLVNPGVAMATHKDDEDRFFPSSGVLIFGKTGATNKTTLENVLMTNEEEIRPTNPVATEEYGIVSSNLQAANTAAQTQVVNNQGALPGMVWQNRDVYLQGPIWAKIPHTDGNFHPSPLMGGFGLKHPPPQILIKNTPVPANPPEVFTPAKFASFITQYSTGQVSVEIEWELQKENSKRWNPEIQYTSNFEKQTGVDFAVDSQGVYSEPRPIGTRYLTRNL

SEQ ID NO: 60 - protein, 738 aa, Adeno-associated virus 8
MAADGYLPDWLEDNLSEGIREWWALKPGAPKPKANQQKQDDGRGLVLPGYKYLGPFNGLDKGEPVNAADAAALEHDKAYDQQLQAGDNPYLRYNHADAEFQERLQEDTSFGGNLGRAVFQAKKRVLEPLGLVEEGAKTAPGKKRPVEPSPQRSPDSSTGIGKKGQQPARKRLNFGQTGDSESVPDPQPLGEPPAAPSGVGPNTMAAGGGAPMADNNEGADGVGSSSGNWHCDSTWLGDRVITTSTRTWALPTYNNHLYKQISNGTSGGATNDNTYFGYSTPWGYFDFNRFHCHFSPRDWQRLINNNWGFRPKRLSFKLFNIQVKEVTQNEGTKTIANNLTSTIQVFTDSEYQLPYVLGSAHQGCLPPFPADVFMIPQYGYLTLNNGSQAVGRSSFYCLEYFPSQMLRTGNNFQFTYTFEDVPFHSSYAHSQSLDRLMNPLIDQYLYYLSRTQTTGGTANTQTLGFSQGGPNTMANQAKNWLPGPCYRQQRVSTTTGQNNNSNFAWTAGTKYHLNGRNSLANPGIAMATHKDDEERFFPSNGILIFGKQNAARDNADYSDVMLTSEEEIKTTNPVATEEYGIVADNLQQQNTAPQIGTVNSQGALPGMVWQNRDVYLQGPIWAKIPHTDGNFHPSPLMGGFGLKHPPPQILIKNTPVPADPPTTFNQSKLNSFITQYSTGQVSVEIEWELQKENSKRWNPEIQYTSNYYKSTSVDFAVNTEGVYSEPRPIGTRYLTRNL

SEQ ID NO: 61 - protein, 736 aa, Adeno-associated virus 9
MAADGYLPDWLEDNLSEGIREWWALKPGAPQPKANQQHQDNARGLVLPGYKYLGPGNGLDKGEPVNAADAAALEHDKAYDQQLKAGDNPYLKYNHADAEFQERLKEDTSFGGNLGRAVFQAKKRLLEPLGLVEEAAKTAPGKKRPVEQSPQEPDSSAGIGKSGAQPAKKRLNFGQTGDTESVPDPQPIGEPPAAPSGVGSLTMASGGGAPVADNNEGADGVGSSSGNWHCDSQWLGDRVITTSTRTWALPTYNNHLYKQISNSTSGGSSNDNAYFGYSTPWGYFDFNRFHCHFSPRDWQRLINNNWGFRPKRLNFKLFNIQVKEVTDNNGVKTIANNLTSTVQVFTDSDYQLPYVLGSAHEGCLPPFPADVFMIPQYGYLTLNDGSQAVGRSSFYCLEYFPSQMLRTGNNFQFSYEFENVPFHSSYAHSQSLDRLMNPLIDQYLYYLSKTINGSGQNQQTLKFSVAGPSNMAVQGRNYIPGPSYRQQRVSTTVTQNNNSEFAWPGASSWALNGRNSLMNPGPAMASHKEGEDRFFPLSGSLIFGKQGTGRDNVDADKVMITNEEEIKTTNPVATESYGQVATNHQSAQAQAQTGWVQNQGILPGMVWQDRDVYLQGPIWAKIPHTDGNFHPSPLMGGFGMKHPPPQILIKNTPVPADPPTAFNKDKLNSFITQYSTGQVSVEIEWELQKENSKRWNPEIQYTSNYYKSNNVEFAVNTEGVYSEPRPIGTRYLTRNL

SEQ ID NO: 62 - protein, 738 aa, Adeno-associated virus 10
MAADGYLPDWLEDNLSEGIREWWDLKPGAPKPKANQQKQDDGRGLVLPGYKYLGPFNGLDKGEPVNAADAAALEHDKAYDQQLKAGDNPYLRYNHADAEFQERLQEDTSFGGNLGRAVFQAKKRVLEPLGLVEEAAKTAPGKKRPVEPSPQRSPDSSTGIGKKGQQPAKKRLNFGQTGESESVPDPQPIGEPPAGPSGLGSGTMAAGGGAPMADNNEGADGVGSSSGNWHCDSTWLGDRVITTSTRTWALPTYNNHLYKQISNGTSGGSTNDNTYFGYSTPWGYFDFNRFHCHFSPRDWQRLINNNWGFRPKRLSFKLFNIQVKEVTQNEGTKTIANNLTSTIQVFTDSEYQLPYVLGSAHQGCLPPFPADVFMIPQYGYLTLNNGSQAVGRSSFYCLEYFPSQMLRTGNNFEFSYTFEDVPFHSSYAHSQSLDRLMNPLIDQYLYYLSRTQSTGGTQGTQQLLFSQAGPANMSAQAKNWLPGPCYRQQRVSTTLSQNNNSNFAWTGATKYHLNGRDSLVNPGVAMATHKDDEERFFPSSGVLMFGKQGAGRDNVDYSSVMLTSEEEIKTTNPVATEQYGVVADNLQQANTGPIVGNVNSQGALPGMVWQNRDVYLQGPIWAKIPHTDGNFHPSPLMGGFGLKHPPPQILIKNTPVPADPPTTFSQAKLASFITQYSTGQVSVEIEWELQKENSKRWNPEIQYTSNYYKSTNVDFAVNTEGTYSEPRPIGTRYLTRNL

SEQ ID NO: 63 - protein, 736 aa, Adeno-associated virus
MAADGYLPDWLEDNLSEGIREWWALKPGAPQPKANQQHQDNARGLVLPGYKYLGPGNGLDKGEPVNEADAAALEHDKAYDQQLKAGDNPYLKYNHADAEFQERLKEDTSFGGNLGRAVFQAKKRLLEPLGLVEEAAKTAPGKKRPVEQSPQEPDSSVGIGKSGAQPAKKRLNFGQTGDTESVPDPQPIGEPPAAPSGVGSLTMASGGGAPVADNNEGADGVGSSSGNWHCDSQWLGDRVITTSTRTWALPTYNNHLYKQISNSTSGGSSNDNAYFGYSTPWGYFDFNRFHCHFSPRDWQRLINNNWGFRPKRLNFKLFNIQVKEVTDNNGVKTIANNLTSTVQVFTDSDYQLPYVLGSAHEGCLPPFPADVFMIPQYGYLTLNDGSQAVGRSSFYCLEYFPSQMLRTGNNFQFSYEFENVPFHSSYAHSQSLDRLMNPLIDQYLYYLSKTINGSGQNQQTLKFSVAGPSNMAVQGRNYIPGPSYRQQRVSTTVTQNNNSEFAWPGASSWALNGRNSLMNPGPAMASHKEGEDRFFPLSGSLIFGKQGTGRDNVDADKVMITNEEEIKTTNPVATESYGQVATNHQSAQAQAQTGWVQNQGILPGMVWQDRDVYLQGPIWAKIPHTDGNFHPSPLMGGFGMKHPPPQILIKNTPVPADPPTAFNKDKLNSFITQYSTGQVSVEIEWELQKENSKRWNPEIQYTSNYYKSNNVEFAVNTEGVYSEPRPIGTRYLTRNL

SEQ ID NO: 64 - protein, 736 aa, Adeno-associated virus
MAADGYLPDWLEDNLSEGIREWWALQPGAPKPKANQQHQDNARGLVLPGYKYLGPGNGLDKGEPVNAADAAALEHDKAYDQQLKAGDNPYLKYNHADAEFQERLKEDTSFGGNLGRAVFQAKKRLLEPLGLVEEAAKTAPGKKRPVDQSPQEPDSSSGVGKSGKQPARKRLNFGQTGDSESVPDPQPLGEPPAAPTSLGSNTMASGGGAPMADNNEGADGVGNSSGNWHCDSQWLGDRVITTSTRTWALPTYNNHLYKQISSQSGASNDNHYFGYSTPWGYFDFNRFHCHFSPRDWQRLINNNWGFRPKKLSFKLFNIQVKEVTQNDGTTTIANNLTSTVQVFTDSEYQLPYVLGSAHQGCLPPFPADVFMVPQYGYLTLNNGSQAVGRSSFYCLEYFPSQMLRTGNNFQFSYTFEDVPFHSSYAHSQSLDRLMNPLIDQYLYYLNRTQGTTSGTTNQSRLLFSQAGPQSMSLQARNWLPGPCYRQQRLSKTANDNNNSNFPWTAASKYHLNGRDSLVNPGPAMASHKDDEEKFFPMHGNLIFGKEGTTASNAELDNVMITDEEEIRTTNPVATEQYGTVANNLQSSNTAPTTRTVNDQGALPGMVWQDRDVYLQGPIWAKIPHTDGHFHPSPLMGGFGLKHPPPQIMIKNTPVPANPPTTFSPAKFASFITQYSTGQVSVEIEWELQKENSKRWNPEIQYTSNYNKSVNVDFTVDTNGVYSEPRPIGTRYLTRPL

SEQ ID NO: 65 - protein, 735 aa, Adeno-associated virus
MAADGYLPDWLEDTLSEGIRQWWKLKPGPPPPKPAERHKDDSRGLVLPGYKYLGPFNGLDKGEPVNEADAAALEHDKAYDRQLDSGDNPYLKYNHADAEFQERLKEDTSFGGNLGRAVFQAKKRVLEPLGLVEEPVKTAPGKKRPVEHSPVEPDSSSGTGKAGQQPARKRLNFGQTGDADSVPDPQPLGQPPAAPSGLGSTTMATGSGAPMADNNEGADGVGNSSGNWHCDSQWLGDRVITTSTRTWALPTYNNHLYKQISSQSGASNDNHYFGYSTPWGYFDFNRFHCHFSPRDWQRLINNNWGFRPKRLNFKLFNIQVKEVTQNGGTTTIANNLTSTVQVFTDSEYQLPYVLGSAHQGCLPPFPADVFMVPQYGYLTLNNGSQAVGRSSFYCLEYFPSQMLRTGNNFQFSYTFEDVPFHSSYAHSQSLDRLMNPLIDQYLYYLNKTQTNSGTLQQSRLLFSQAGPTNMSLQAKNWLPGPCYRQQRLSKQANGNNNSNFPWTAATKYHLNGRDSLVNPGPAMASHKDDEEKFFPMHGTLIFGKQGTNANDADLENVMITDEEEIRATNPVATEQYGTVSNNLQNSNTGPTTGTVNHQGALPGMVWQDRDVYLQGPIWAKIPHTDGHFHPSPLTGGFGLKHPPPQIMIKNTPVPANPPTNFSSAKFASFITQYSTGQVSVEIEWELQKENSKRWNPEIQYTSNYNKSVNVDFTVDTNGVYSEPRPIGTRYLTRNL

SEQ ID NO: 66 - protein, 735 aa, Adeno-associated virus
MAADGYPPDWLEDTLSEGIRQWWKLKPGPPPPKPAERHKDDSRGLVLPGYKYLGPFNGLDKGEPVNEADAAALEHDKAYDRQLDSGDNPYLKYNHADAEFQERLKEDTSFGGNLGRAVFQAKKRVLEPLGLVEEPVKTAPGKKRPVEHSPVEPDSSSGTGKAGQRPARKRLNFGQTGDADSVPDPQPLGQPPAAPSGLGSTTMATGSGAPMADNNEGADGVGNSSGNWHCDSQWLGDRVITTSTRTWALPTYNNHLYKQISSQSGASNDNHYFGYSTPWGYFDFNRFHCHFSPRDWQRLINNNWGFRPKRLNFKLFNIQVKEVTQNDGTTTIANNLTSTVQVFTDSEYQLPYVLGSAHQGCLPPFPADVFMVPQYGYLTLNNGSQAVGRSSFYCLEYFPSQMLRTGNNFQFSYTFEDVPFHSSYAHSQSLDRLMNPLIDQYLYYLNKTQTNSGTLQQSRLLFSQAGPTNMSLQAKNWLPGPCYRQQRLSKQANDNNNSNFPWTAATKYHLNGRDSLVNPGPAMASHKDDEEKFFPMHGTLIFGKQGTNANDADLENVMITDEEEIRATNPVATEQYGTVSNNLQNSNTGPTTGTVNRQGALPGMVWQDRDVYLQGPIWAKIPHTDGHFHPSPLMGGFGLKHPPPQIMIKNTPVPANPPTNFSSAKFASFITQYSTGQVSVEIEWELQKENSKRWNPEIQYTSNYNKSVNVDFTVDTNGVYSEPRPIGTRYLTRNL

SEQ ID NO: 67 - protein, 736 aa, Adeno-associated virus
MAADGYLPDWLEDTLSEGIRQWWKLKPGPPPPKPAERHKDDSRGLVLPGYKYLGPFNGLDKGEPVNEADAAALEHDKAYDRQLDSGDNPYLKYNHADAEFQERLKEDTSFGGNLGRAVFQAKKRVLEPLRPGLRKPVKTAPGKKRPVEHSPVEPDSSSGTGKAGQQPARKRLNFGQTGDADSVPDPQPLGQPPAAPSGLGSTTMATGSGAPMADNNEGADGVGNSSGNWHCDSQWLDDRVIATSTRTWALPTYNNHLYKQISSQSGACNDNHYFGYSTPWGYFDFNRFHCHFSPRDWQRLINSNWGFRPKRLNFKLFNIQVKEVTQNDGTTTIANNLTSTVQVFTDSEYQLPYVPGSAHQGCLPPFPADVFMVPQYGYLTLNNGSQAVGRSSFYCLEYFPSQMLRTGNNFQFSYTFEDVPFHSSYAHCQSLDRLMNPLIDQYLYYLNKTQTNSGTLQQSRLLFSQAGPTNMSLQAKNWLPGPCYRQQRLSKQANDNNNCNFPWTAATKYHLNGRDSLVNPGPAMASHKDDEEKFFPMHGTLIFGKQGTNANDADLENVMITDEEEIRPTNPVATEQYGTVSNNLQNSNTGPTTGTVNHQGALPGMVWQDRDVYLQGPIWAKIPHTDGHFHPSPLMGGFGLKHPPPQIMIKSTPVPANPPTNFSSAKFASSITQYSTGQVSVEIEWELQKENSKRWNPEIQYTSNYNKSVNVDFTVDTNGVYSEPRPIGTRYLTRNL

SEQ ID NO: 68 - protein, 735 aa, Adeno-associated virus
MAADGYLPDWLEDTLSEGIRQWWKLKPGPPPPKPAERHKDDSRGLVLPGYKYLGPFNGLDKGEPVNEADAAALEHDKAYDRQLDSGDNPYLKYNHADAEFQERLKEDTSFGGNLGRAVFQAKKRVLEPLGLVEEPVKTAPGKKRPVEHSPVEPDSSSGTGKAGQQPARKRLNFGQTGDADSVPDPQPLGQPPAAPSGLGSTTMATGSGAPMADNNEGADGVGNSSGNWHCDSQWLGDRVITTSTRTWALPTYNNHLYKQISSQSGASNDNHYFGYSTPWGYFDFNRFHCHFSPRDWQRLVNNNRGFRPKRLNFKLFNIQVKEVTQNDGTTTIANNLTSTVQVFTDSEYQLPYVLGSAHQGCLPPFPADVFMVPQYGYLTLNNGSQAVGRSSFYCLEYFPSQMLRTGNNFQFSYTFEDVPFHSSYAHSQSLDRLMNPLIDQYLYYLNKTQTNSGTLQQSRLLFSQAGPTNMSLQAKNWLPGPCYRQQRLSKQANDNNNSNFPWTAATKYHLNGRDSLVNPGPAMASHKDDEEKFFPMHGTLIFGKQGTNANDADLENVMITDEEEIRATNPVATEQYGTVSNNLQNSNTGPTTGTVNHQGALPGMVWQDRDVYLQGPIWAKIPHTDGHFHPSPLMGGFGLKHPPPQIMIKNTPVPANPPTNFSSAKFASFITQYSTGQVSVEIEWELQKENSKRWNPEIQYTSNYNKSVNVDFTVDTNGVYSEPRPIGTRYLTRNL

SEQ ID NO: 69 - protein, 738 aa, Adeno-associated virus
MAADGYLPDWLEDNLSEGIREWWDLKPGAPKPKANQQKQDDGRGLVLPGYKYLGPFNGLDKGEPVNAADAAALEHDKAYDQQLKAGDNPYLRYNHADAEFQERLQEDTSFGGNLGRAVFQAKKRVLEPLGLVEEGAKTAPGKKRPVEPSPQRSPDSSTGIGKTGQQPAKKRLNFGQTGDSESVPDPQPIGEPPAGPSGLGSGTMAAGGGAPMADNNEGADGVGSSSGNWHCDSAWLGDRVITTSTRPWALPTYNNHLYKQISNGTSGGSTNDNTYFGYSTPWGYFDFNRFHCHFSPRDWQRLINNNWGFRPKRLNFKLFNIQVKEVTQNEGTKTIANNLTSTIQVFTDSEYQLPYVLGSAHQGCPPPFPADVFMIPQYGYLTLNNGSQAVGRSSFYCLEYFPSQMRRTGNNFEFSYQFEDVPFHSSYAHSQSLDRLMNPLIDQYLYYLSRTQSTGGTAGTQQLLFSQAGPNNMSAQAKNWLPGPCYRQQRVSTTLSQNNNSNFAWTGATKYHLNGRDSLVNPGVAMATHKDDEERFFPSSGVLMFGKQGAGKDNVDYSSVMLTSEEEIKTTNPVATEQYGVVADNLQQQNAAPIVGAVNSQGALPGMVWQNRDVYLQGPIWAKIPHTDGNFHPSPLMGGFGLKHPPPQILIKNTPVPADPPTTFSQAKLASFITQYSTGQVSVEIEWELQKENSKRWNPEIQYTSNYYKSTNVDFAVNTEGTYSEPRPIGTRYLTRNL

SEQ ID NO: 70 - protein, 735 aa, Adeno-associated virus
MAADGYLPDWLEDTLSEGIRQWWKLKPGPPPPKPAERHKDDSRGLVLPGYKYLGPFNGLDKGEPVNEADAAALEHDKAYDRQLDSGDNPYLKYNHADAEFQERLKEDTSFGGNLGRAVFQAKKRVLEPLGLVEGPVKTAPGKKRPVEHSPAEPDSSSGTGKAGQQPARKRLNFGQTGDADSVPDPQPLGQPPAAPSGLGSTTMATGSGAPMADNNEGADGVGNSSGNWHCDSQWLGDRVITTSTRTWALPTYNNHLYKQISSQSGASNDNHYFGYSTPWGYFDFNRFHCHFSPRDWQRLINNNWGFRPKRLNFKLFNIQVKEVTQNDGTTTIANNLTSTVQVFTDSEYQLPYVLGSAHQGCLPPFPADVFMVPQYGYLTLNNGSQAVGRSSFYCLEYFPSQMLRTGNNFQFSYTFEDVPFHSSYAHSQSLDRLMNPLIDQYLYYLNKTQSNSGTLQQSRLLFSQAGPTSMSLQAKNWLPGPCYRQQRLSKQANDNNNSNFPWTAATKYHLNGRDSLVNPGPAMASHKDDEEKFFPMHGTLIFGKQGTNANDADLDNVMITDEEEIRTTNPVATEQYGYVSNNLQNSNTGPTTGTVNHQGALPGMVWQDRDVYLQGPIWAKIPHTDGHFHPSPLMGGFGLKHPPPQIMIKNTPVPANPPTNFSSAKFASFITQYSTGQVSVEIEWELQKENSKRWNPEIQYTSNYNKSVNVDFTVDTNGVYSEPRPIGTRYLTRNL

SEQ ID NO: 71 - protein, 735 aa, Adeno-associated virus
MAADGYLPDWLEDTLSEGIRQWWKLKPGPPPPKPAERHQDNSRGLVLPGYKYLGPSNGLDKGEPVNEADAAALEHDKAYDRQLDSGDNPYLKYNHADAEFQERLKEDTSFGGNLGRAVFQAKKRVLEPLGLVEEPVKTAPGKKRPVEHSPVEPDSSSGTGKAGHQPARKRLNFGQTGDADSVPDPQPLGQPPAAPTSLGSTTMATGSGAPMADNNEGADGVGNSSGNWHCDSQWLGDRVITTSTRTWALPTYNNHLYKQISSQSGASNDNHYFGCSTPWGYFDFNRFHCHFSPRDWQRLINNNWGFRPKRLNFKLFNIQVKEVTQNDGTTTIANNLTSTVQVFTDSEYPLPYVLGSAHQGCLPPFPADVFMVPQYGYLTLNNGSQAVGRSSFYCLEYFPSQMLRTGNNFTFSYTFEDVPFHSSYAHSQSLDRLMNPLIDQYLYYLNRTQSNSGTLQQSRLLFSQAGPTSMSLQAKNWLPGPCYRQQRLSKQANDNNNSNFPWTAATKYHLNGRDSLVNPGPAMASHKDDEEKFFPMHGTLIFGKQGTNANDADLEHVMITDEEEIRTTNPVATEQYGNVSNNLQNSNTGPTTENVNHQGALPGMVWQDRDVYLQGPIWAKIPHTDGHFHPSPLMGGFGLKHPPPQIMIKNTPVPANPPTNFSSAKFASFITQYSTGQVSVEIEWELQKENSKRWNPEIQYTSNYNKSVNVDFTVDTNGVYSEPCPIGTRYLTRNL

SEQ ID NO: 72 - protein, 735 aa, Adeno-associated virus
MAADGYLPDWLEDTLSEGIRQWWKLKPGPPPPKLAERHQDDSRGLVLPGYKYLGPFNGLDKGEPVNEADAAALEHDKAYDRQLDSGDNPYLKYNHADAEFQERLKEDTSFGGNLGRAVFQAKKRVLEPLGLVEEPVKTAPGKKRPVEHSPVEPDSSSGTGKAGHQPARKRLNFGQTGDADSVPDPQPLGQPPAAPTSLGSTTMATGSGAPMADNNEGADGVGNSSGNWHCDSQWLGDRVITTSTRTWALPTYNNHLYKQISSQSGASNDNHYFGYSTPWGYFDFNRFHCHFSPRDWQRLINNNWGFRPKRLNFKLFNIQVKEVTQNDGTTTIANNLTSTVQVFTDSEYQLPYVLGSAHQGCLPPFPADVFTVPQYGYLTLNNGSQAVGRSSFYCLEYFPSQMLRTGNNLTFSYTFEDVPFHSSYAHSQSLDRLMNPLIDQYLYYLNRTQSNSGTLQQSRLLFSQAGPTSMSLQAKNWLPGPCYRQQRLSKQANDNNNSNFPWTAATKYHLNGRDSLVNPGPAMASHKDDEEKFFPMHGTLIFGKQGTNANDADLEHVMITDEEEIRTTNPVATEQYGNVSNNLQNSNTGPTTENVNHQGALPGMVWQDRDVYLQGPIWAKIPHTDGHFHPSPLMGGFGLKHPPPQIMIKNTPVPANPPTNYSSAKFASFITQYSTGQVSVEIEWELRKENSKRWNPEIQYTSNYNKSVNVDFTVDTNGVYSEPRPIGTRYLTRNL

SEQ ID NO: 73 - protein, 735 aa, Adeno-associated virus
MAADGYLPDWLEDTLSEGIRQWWKLKPGPPPPKPAERHQDDSRGLVLPGYKYLGPFNGLDKGEPVNEADAAALEHDKAYDRQLDSGDNPYLKYNHADAEFQERLKEDTSFGGNLGRAVFQAKKRVLEPLGLVEEPVKTAPGKKRPVEHSPVEPDSSSGTGKAGHQPARKRLNFGQTGDADSVPDPQPLGQPPAAPTSLGSTTMATGSGAPMADNNEGADGVGNSSGNWHCDSQWLGDRVITTSTRTWALPTYNNHLYKQISSQSGASNDNHYFGYSTPWGYFDFNRFHCHFSPRDWQRLINNNWGFRPKRLNFKLFNIQVKEVTQNDGTTTIANNLTSTVQVFTDSEYQLPYVLGSAHQGCLPPFPADVFMVPQYGYLTLNNGSQAVGRSSFYCLEYFPSQMLRTGNNFTFSYTFEDVPFHSSYAHSQSLDRLMNPLIDQYLYYLNRTQSNSGTLQQSRLLFSQAGPTSMSLQAKNWLPGPCYRQQRLSKQANDNNNSNFPWTAATKYRLNGRDSLVNPGPAMASHKDDEEKFFPMHGTLIFGKQGTNANDADLEHVMITDEEEIRTTNPVATEQYGNVSNNLQNSNTGPTTENVNHQGALPGMVWQDRDVYLQGPIWAKIPHTDGHFHPSPLMGGFGLKHPPPQIMIKNTPVPANPPTNFSSAKFASFITQYSTGQVSVEIEWELQKENSKRWNPEIQYTSNYNKSVNVDFTVDTNGVYSEPRPIGTRYLTRNL

SEQ ID NO: 74 - protein, 735 aa, Adeno-associated virus
MAADGYLPDWLEDTLSEGIRQWWKLKPGPPPPKPAERHKDDSRGLVLPGYKYLGPFNGLYKGEPVDEADAAALEHDKAYDRQLDSGDNPYLKYNHADAEFQERLKEDTSFGGNLGRAVFQAKKRVLEPLGLVGEPVKTAPGKKRPVEHSPVEPDSSSGTGKAGNQPARKRLNFGQTGDADSVPDPQPLGQPPAAPSGLGSTTMATGSGAPVADNNEGADGVGNSSGNWHCDSQWLGDRVITTSTRTWALPTYNNHLYKQISSQSGASNDNHYFGYSTPWGYFDFNRFHCHFSPRDRQRLINNNWGFRPKRLNFKLFNIQVKEVTQNDGTTTIANNLTSTVQVFTDSGYQLPYVLGLAHQGCLPPFPADVFMVPQYGYLTLNNGSQAVGRSSFYCLEYFPSQMLRTGNNFQFSYTFEDVPFHSSYAHSQSLDRLMNPLIDQYLYYLNKTQSNSGTLQQSRLLFSQAGPTSMSLQAKNWLPGPCYRQQRLSKQANDNNNSNFPWTAATKYHLNGRDSLVNPGPAMASHKDDEEKFFPMHGTLIFGKQGTNANDADLDNVMITDEEEIRTTNPVATEQYGYVSNNLQNSNTGPTTGTVNHQGALPGMVWQDRDVYLQGPIWAKIPHTDGHFHPSPLMGGFGLKHPPPQIMIKNTPVPANPPTNFSSAKFASFITQYSTGQVSVEIEWELQKEDSKRWNPEIQYTSNYNKPVNVDFTVDTNGVYSEPRPIGTRYLTRNL

SEQ ID NO: 75 - protein, 735 aa, Adeno-associated virus
MAADGYLPDWLEDTLSEGIRQWWKLKPGPPPPKPAERHKDDSRGLVLPGYKYLGPFNGLYKGEPVNEADAAALEHDKAYDRQLDSGDNPYLKYNHAGAEFQERLKEDTSFGGNLGRAVFQAKKRVLEPLGLVEEPVKTAPGKKRPVEHSPVEPDSSSGTGKAGNQPARKRLNFGQTGDADSVPDPQPLGQPPAAPSGLGSTTMATGSGAPVADNNEGADGVGNSSGNWHCDSQWLGDRVITTSTRTWALPTYNNHLYKQISSQSGASNDNHYFGYSTPWGYFDFNRFHCHFSPRDWQRLINNNWGFRPKRLNFKLFNIQVKEVTQNDGTTTIANNLTSTVQVFTDSEYQLPYVLGSAHQGCLPPFPADVFMVPQYGYLTLNNGSQAVGRSSFYCLEYFPSQMLRTGNNFQFSYTFEDVPFHSSYAHSQSLDRLMNPLIDQYLYYLNKTQSNSGTLQQSRLLFSQAGPTSMSLQAKNWLPGPCYRQQRLSKQANDNNNSNFPWTAATKYHLNGRDSLVNPGPAMASHKDDEEKFFPMHGTLIFGKQGTNANDADLDNVMITDEEEIRTTNPVATEQYGYVSNNLQDSNTGPTTGTVNHQGALPGMVWQDRDVYLQGPIWAKIPHTDGHFHPSPLMGGFGLKHPPPQIMIKNTPVPANPPTNFSSAKFASFITQYSTGQVSVEIEWELQKENSKRWNPEIQYTSNYNKSVNVDFTVDTNGVYSEPRPIGTRYLTRNL

SEQ ID NO: 76 - protein, 738 aa, Adeno-associated virus
MAADGYLPDWLEDNLSEGIREWWDLKPGAPKPKANQQKQDDGRGLVLPGCKYLGPFNGLDKGEPVNAADAAALEHDKAYDQQLKAGDNPYLRYNHADAEFQERLQEDTSFGGNLGRAVFQAKKRVLEPLGLVEEGAKTAPGKKRPVEPSPQRSPDSSTGIGKTGQQPAKKRLNFGQTGDSESVPDPQPIGEPPAGPSGLGSGTMAAGGGAPMADNNEGADGVGSSSGNWHCDSTWLGDRVITTSTRTWALPTYNNHLYKQISNGTSGGSTNDNTYFGYSTPWGYFDFNRFHCHFSPRDWQRLINNNWGFRPKRLNFKLFNIQVKEVTQNEGTKTIANNLTSTIQVFTDSEYQLPYVLGSAHQGCPPPFPADVFMIPQYGYLTLNNGSQAVGRSSFYCLEYFPSQMRRTGNNFEFSYQFEDVPFHSSYAHSQSLDRLMNPLIDQYLYYLSRTQSTGGTAGTQQLLFSQAGPNNMSAQAKNWLPGPCYRQQRVSTTLSQNNNSNFAWTGATKYHLNGRDSLVNPGVAMATHKDDEERFFPSSGVLMFGKQGAGKDNVDYSSVMLTSEEEIKTTNPVATEQYGVVADNLQQQNAAPIVGAVNSQGALPGMVWQNRDVYLQGPIWAKIPHTDGNFHPSPLMGGFGLKHPPPQILIKNTPVPADPPTTFSQAKLASFITQYSTGQVSVEIEWELQKENSKRWNPEIQYTSNYNKSVNVDFTVDTNGVYSEPRPIGTRYLTRNL

SEQ ID NO: 77 - protein, 735 aa, Adeno-associated virus
MAADGYLPDWLEDTLSEGIRQWWKLKPGPPPPKPAERHKDDSRGLVLPGYKYLGPFNGLDKGEPVNEADAAALEHDKAYDRQLESGDNPYLKYNHADAEFQERLKEDTSFGGNLGRAVFQAKKRVLEPLGLVEEPVKTAPGKKRPVEHSPVEPDSSSGTGKAGQQPARKRLNFGQTGDADSVPDPQPLGQPPAAPSGLGSTTMASGSGAPVADNNEGADGVGNSSGNWHCDSQWLGDRVITTSTRTWALPTYNNHLYKQISSQSGASNDNHYFGYSTPWGYFDFNRFHCHFSPRDWQRLINNSWGFRPKRLNFKLFNIQVKEVTQNDGTTTIANNLTSTVQVFTDSEYQLPYVLGSAHQGCLPPFPADVFMVPQYGYLTLNNGSQAVGRSSFYCLEYFPSQMLRTGNNFQFSYTFEDVPFHSSYAHSQSLDRLLNPLIDQYLYYLNKTQSNSGTLQQSRLLFSQAGPTSMSLQAKNWLPGPCYRQQRLSKQANDNNNSNFPWTAATKYHLNGRDSLVNPGPAMASHKDDEEKFFPMHGTLIFGKQGTNANDADLDNVMITDEEEIRTTNPVATEQYGYVSNNLQNSNTGPTTGTVNHQGALPGMVWQDRDVYLQGPIWAKIPHTDGHFHPSPLMGGFGLKHPPPQIMIKNTPVPANPPTNFSSSKFASFITQYSTGQVSVEIEWELQKENSKRWNPEIQYTSNYNKSVNVDFTVDTNGVYSEPRPIGTRYPTRNL

SEQ ID NO: 78 - protein, 735 aa, Adeno-associated virus
MAADGYLPDWLEDTLSEGIRQWWKLKPGPPPPKPAERHKDDSRGLVLPGYRYLGPFNGLDKGEPVNEADAAALEHDKAYDRQLDSGDNPYLKYNHVDAEFQERLKEDTSFGGNLGRAVFQAKKRILEPLGLVEEPVKAAPGEKRPVEHSPAEPDSSSGTGKAGQQPARKRLNFGQTGDADSVPDPQPLGQPPAAPSGLGTNTMASGSGAPMADNNEGADGVGNSSGNWHCDSTWMGDRVITTSTRTWALPTYNNHLYKQISSQSGASNDNHYFGYSTPWGHFDFNRFHCHFSPRDWQRLINNNWGFRPKRLSFKLFNIQVKEVTQNDGTTTIANNLTSTVQVFTDSEYQLPYVLGSAHQGCLPPFPADVFMVPQYGYLTLNNGSQAVGRSSFYCLEYFPSQMLRTGNNFTFSYTFEDVPFHSSYAHSQSLDRLMNPLIDQYLYYLSRTNTPSGTTTMSRLQFSQAGASDIRDQSRNWLPGPCYRQQRVSKTAADNNNSDYSWTGATKYHLNGRDSLVNPGPAMASHKDDEEKYFPQSGVLIFGKQDSGKTNVDIEKVMITDEEEIRTTNPVATEQYGSVSTNLQSGNTQAATSDVNTQGVLPGMVWQDRDVYLQGPIWAKIPHTDGHFHPSPPMGGFGLKHPPPQILIKNTPVPANPSTTFSAAKFASFITQYSTGQVSVEIEWELQKENSKRWNPEIQYTSNYNKSVNVDFTVDTNGVYSEPRPIGARYLTRNL

SEQ ID NO: 79 - protein, 735 aa, Adeno-associated virus
MAADGYLPDWLEDTLSEGIRQWWKLKPGPPPPKPAERHKDDSRGLVLPGYKYLGPFNGLDKGEPVNEADAAALEHDKAYDRQLDSGDNPYLKYNHADAEFQERLKEDTSFGGNLGRAVFQAKKRILEPLGLVEEPVKTAPGKKRPVEHSPAEPDSSSGTGKAGQQPARKRLNFGQTGDADSVPDPRPLGQPPAAPSGLGTNTMASGSGAPMADNNEGADGVGNSSGNWHCDSTWMGDRVITTSTRTWALPTYNNHLYKQISSQSGASNDNHYFGYSTPWGYFDFNRFHCHFSPRDWQRLINNNWGFRPKRLSFKLFNIQVKEVTQNDGTTTIANNLTSTVQVFTDSEYQLPYVLGSAHQGCLPPFPADVFMVPQYGYLTLNNGSQAVGRSSFYCLEYFPSQMLRTGNNFTFSYTFEDVPFHSSYAHSQSLDRLMNPLIDQYLYYLSRTNTPSGTTTMSRLQFSQAGASDIRDQSRNWLPGPCYRQQRVSKTAADNNNSDYSWTGATKYHLNGRDSLVNPGPAMASHKDDEEKYFPQSGVLIFGKQDSGKTNVDIEKVMITDEEEIRTTNPVATEQYGSVSTNLQSGNTQAATSDVNTQGVLPGMVWQDRDVYLQGPIWAKIPHTDGHFHPSPLMGGFGLKHPPPQILIKNTPVPANPSTTFSAAKFASFITQYSTGQVSVEIEWELQKENSKRWNPEIQYTSNYNKSVNVDFTVDTNGVYSEPRPIGTRYLTRNL

SEQ ID NO: 80 - protein, 735 aa, Adeno-associated virus
MAADGYLPDWLEDTLSEGIRQWWKLKPGPPPPKPAERHKDDSRGLVLPGYKYLGPFNGLDKGEPVNEADAAALEHDKAYDRQLDSGDNPYLKYNHADAEFQERLKGDTSFGGNLGRAVFQAKKRILEPLGLVEEPVKTAPGKKRPVEHSPAEPDSSSGTGKAGQQPARKRLNFGQTGDADSVPDPQPLGQPPAAPSGLGTNTMASGSGAPMADNNEGADGVGNSSGNWHCDSTWMGGRVITTSTRTWALPTYNNHLYKQISSQSGASNDNHYFGYSTPWGYFDFNRFHCHFSPRDWQRLINNNWGFRPKRLSFKLFNIQVKEVTQNDGTTTIANNLTSTVQVFTDSEYQLPYVLGSAHQGCLPPFPADVFMVPQYGYLTLNNGSQAVGRSSFYCLEYFPSQTLRTGNNFTFSYTFEDVPFHSSYAHSQSLDRLMNPLIDQYLYYLSRTNTPSGTTTMSRLQFSQAGASDIRDQSRNWLPGPCYRQQRVSKTAADNNNSDYSWTGATKYHLNGRDSLVNPGPAMASHKDDEEKYFPQSGVLIFGKQDSGKTNVDIEKVMITDEEEIRTTNPVATEQYGSVSTNLQSGNTQAATSDVNTQGVLPGMVWQDRDVYLQGPIWAKIPHTDGHFHPSPLMGGFGLKHPPPQILIKNTPVPANPSTTFSAAKFASFITQYSTGQVSVEIEWELQKENSKRWNPEIQYTSNYNKSVNVDFTVDTNGVYSEPRPIGTRYLTRNL

SEQ ID NO: 81 - protein, 735 aa, Adeno-associated virus
MAADGYLPDWLEDTLSEGIRQWWKLKPGPPPPKPAERHKDDSRGLVLPGYKYLGPFNGLDKGEPVNEADAAALEHDKAYDRQLDSGDNPYLKYNHADAEFQERLKEDTSFGGNLGRAVFQAKKRILEPLGLVEEPVKTAPGKKRPVEHSPAEPDSSSGTGKAGQQPARKRLNFGQTGDADSVPDPQPLGQPPAAPSGLGTNTMASGSGAPMADNNEGADGVGNSSGNWHCDSTWMGDRVITTSTRTWALPTCNNHLYKQISSQSGASNDNHYFGYSTPWGYFDFNRFHCHFSPRDWQRLINNNWGFRPKRLSFKLFNIQVKEVTQNDGTTTIANNLTSTVQVFTDSEYQLPYVLGSAHQGCLPPFPADVFMVPQYGYLTLNNGSQAVGRSSFYCLEYFPSQMLRTGNNFTFSYTFEDVPFHSSYAHSQSLDRLMNPLIDQYLYYLSRTNTPSGTTTMSRLQFSQAGASDIRDQSRNWLPGPCYRQQRVSKTAADNNNSDYSWTGATKYHLNGRDSLVNPGPAMASHKDDEEKYFPQSGVLIFGKQDSGKTNVDIEKVMITDEEEIRTTNPVATEQYGSVSTYLQSGNTQAATSDVNTQGVLPGMVWQDRDVYLRGPIWAKIPHTDGHFHPSPLMGGFGLKHPPPQILIKNTPVPANPSTTFSAAKFASFITQYSTGQVSVEIEWELQKENSKRWNPEIQYTSNYNKSVNVDFTVDTNGVYSEPRPIGTRYLTRNL

SEQ ID NO: 82 - protein, 735 aa, Adeno-associated virus
MAADGYLPDWLEDTLSEGIRQWWKLKPGPPPPKPAERHKDGSRGLVLPGYKYLGPFNGLDKGEPVNEADAAALEHDKAYDRQLNSGDNPYLKYNHADAEFQERLKEDTSFGGNLGRAVFQAKKRVLEPLGLVEEPVKTAPGKKRPVEHSPAEPDSSSGTGKAGQQPARKRLNFGQTGDADSVPDPQPLGQPPAAPSGLGSTTMATGSGAPMADNNEGADGVGNSSGNWHCDSQWLGDRVITTSTRTWALPTYNNHLYKQISSQSGASNDNHYFGYSTPWGYFDFNRFHCHFSPRDWQRLINNNWGFRPKRLNFKLFNIQVKEVTQNDGTTTIANNLTSTVQVFTDSEYQLPYVLGSAHQGCLPPFPADVFMVPQYGYLTLNNGSQAVGRSPFYCLEYFPSQMLRTGNNFQFSYTFEDVPFHSSYAHSQSLDRLMNPLIDQYLYYLNKTQTNSGTLQQSRLLFSQAGPTNMSLQAKNWLPGPCYRQQRLSKQANDNNNSNFPWTAATKYHLNGRDSLVNPGPAMASHKDDEEKFFPMHGTLIFGKQGTNANDADLENVMITDEEEIRTTNPVATEQYGTVSNNLQNSNTGPTTGTVNHQGALPGMVWQDRDVYLQGPIWAKIPHTDGHFHPSPLMGGFGLKHPPPQIMIKNTPVPANPPTNFSSAKFASFITQYSTGQVSVEIEWELQKENSKRWNPEIQYTSNYNKSVNVDFTVDNNGVYSEPRPIGTRYLTRNL

SEQ ID NO: 83 - protein, 735 aa, Adeno-associated virus
MAADGYLPDWLEDTLSEGIRQWWKLKPGPPPPKPAERHKDDSRGLVLPGYKYLGPFNGLDKGEPVNEADAAALEHDKAYDRQLDSGDNPYLKYNHADAEFQERLKEDTSFGGNLGRAVFQAKKRILEPLGLVEEPVKTAPGKKRPVEHSPAEPDSSSGTGKAGQQPARKRLNFGQTGDADSVPDPQPLGQPPAAPSGLGTNTMASGSGAPMADNNEGADGVGNSSGNWHCDSTWMGDRVITTSTRTWALPTYNNHLYKQISSQSGASNDNHYFGYSTPWGYFDFNRFHCHFSPRDWQRLINNNWGFRPKRLSFKLFNIQVKEVTQNDGTTTIANNLTSTVQVFTDSGYQLPYVLGSAHQGCLPPFPADVFMVPQYGYLTLNNGSQAVGRSSFYCLEYFPSQMLRTGNNFTFSYTFEDVPFHSSYAHGQSLDRLMNPLIDQYLYYLSRTNTPSGTTTMSRLQFSQAGASDVRDQSRNWLPGPCYRQQRVSKTAADNNNSDYSWTGATKYHLNGRDSLVNPGPAMASHKDDEEKYFPQSGVLVFGKQDSGKTNVDIEKVMITDEEEIRTTNPAATEQYGSVSTNLQSGNTQAATSDVNTQGVLPGMVWQDRDVYLQGPIWAKIPHTDGHFHPSPLMGGFGLKHPPPQILIKNTPVPANPSTTFSAAKFVSFITQYSTGQVSVEIEWELQKENSKRWNPEIQYTSNYNKSVNVDFTVDTNGVYSEPRPIGTRYLTRNL

SEQ ID NO: 84 - protein, 735 aa, Adeno-associated virus
MAADGYLPDWLEDTLSEGIRQWWKLKPGPPPPKPAERHKDDSRGLVLPGYKYLGPFNGLDKGEPVNEADAAALEHDKAYDRQLDSGDNPYLKYNHADAEFQERLKEDTSFGGNLGRAVFQAKKRVLEPLSLVEEPVKTAPGKKRPVEHSPAEPDSSSGTGKSGNQPARKRLNFGQTGDSDSVPDPQPLGQPPAAPSGLGTNTMATGSGAPMADNNEGADGVGNSSGNWHCDSTWMGDRVITTSTRTWALPTYNNHLYKQISSQSGASNDNHYFGYSTPWGYFDFNRFHCHFSPRDWQRLINNNWGFRPKRLNFKLFNIQVKEVTQNDGTTTIANNLTSTVQVFTDSEYQLPYVLGSAHQGCLPPFPADVFMVPQYGYLTLNNGSQAVGRSSFYCLEYFPSQMLRTGNNFTFSYTFEDVPFHSSYAHSQSLDRLMNPLIDQYLYYLSRTNTPSGTTTQSRLQFSQAGASDIQDQSRNWLPGPCYRQQRVSKTSADNNNSEYSWTGATKYHLNGRDSLVNPGPAMASHKDDEEKFFPQSGVLIFGKQGSEKTNVDIEKVMITDEEEIRTTNPVATEQYGSVSTNLQSGNTQAATADVNTQGVLPGMVGQDRDVYLQGPTWAKIPHTDGHFHPSPLMGGFGLKHPPPQILIKNTPVPANPSTTFSAAKFASFITQYSTGQVSVEIEWELQKENSKRWNPEIQYTSNYNKSVNVDFTVDTNGVYSEPRPIGTRYLTRNL

SEQ ID NO: 85 - protein, 735 aa, Adeno-associated virus
MAADGYLPDWLEDTLSEGIRQWWKLKPGPPPPKPAERHKDDSRGLVLPGYKYLGPFNGLDKGEPVNEADAAALEHDKAYDRQLDSGDNPYLKYNHADAEFQERLKEDTSFGGNLGRAVFQAKKRVLEPLGLVEEPVKTAPGKKRPVEHSPAEPDSSSGTGKSGNQPARKRLNFGQTGDSDSVPDPQPLGQPPAAPSGLGTNTMATGSGAPMADNNEGADGVGNSSGNWHCDSTWMGDRVITTSTRTWALPTYNNHLYKQISSQSGASNDNHYFGYSTPWGYFDFNRFHCHFSPRDWQRLINNNWGFRPKRLNFKLFNIQVKEVTQNDGTTTIANNLTSTVQVFTDSEYQLPYVLGSAHQGCLPPFPADVFMVPQYGYLTLNNGSQAVGRSSFYCLGYFPSQMLRTGNNFTFSYTFEDVPFHSSYAHSQSLDRLMNPLIDQYLYYLSRTNTPSGTTTQSRLQFSQAGASDIRDQSRNWLPGPCYRQQRVSKTSADNNNSEYSWTGATKYHLNGRDSLVNPGPAMASHKDDEEKFFPQSGVLIFGKQGPEKTNVDIEKVMITDEEEIRTTNPVATEQYGSVSTNLQSGNTQAATADVNTQGVLPGMVWQDRDVYLQGPIWAKIPHTDGHFHPSPLMGGFGLKHPPPQILIKNTPVPANPSTTFSAAKFASFITQYSTGQVSVEIEWELQKENSKRWNPEIQYTSNYNKSVNVDFTVDTNGVYSEPRPIGTRYLTRNL

SEQ ID NO: 86 - protein, 736 aa, Adeno-associated virus
MAADGYLPDWLEDTLSEGIRQWWKLKPGPPPPKPAERHKDDSRGLVLPGYKYLGPGNGLDKGEPVNAADAAALEHDKAYDQQLKAGDNPYLKYNHADAEFQERLKEDTSFGGNLGRAVFQAKKRLLEPLGLVEEAAKTAPGKKRPVEQSPQEPDSSAGIGKSGSQPAKKKLNFGQTGDTESVPDPQPIGEPPAAPSGVGSLTMASGGGAPVADNNEGADGVGSSSGNWHCDSQWLGDRVITTSTRTWALPTYNNHLYKQISNSTSGGSSNDNAYFGYSTPWGYFDFNRFHCHFSPRDWQRLINNNWGFRPKRLNFKLFNIQVKEVTDNNGVKTIANNLTSTVQVFTDSDYQLPYVLGSAHEGCLPPFPADVFMIPQYGYLTLNDGGQAVGRSSFYCLEYFPSQMLRTGNNFQFSYEFENVPFHSSYAHSQSLDRLMNPLIDQYLYYLSKTINGSGQNQQTLKFSVAGPSNMAVQGRNYIPGPSYRQQRVSTTVTQNNNSEFAWPGASSWALNGRNSLMNPGPAMASHKEGEDRFFPLSGSLIFGKQGTGRDNVDADKVMITNEEEIKTTNPVATESYGQVATNHQSAQAQAQTGWVQNQGILPGMVWQDRDVYLQGPIWAKIPHTDGNFHPSPLMGGFGMKHPPPQILIKNTPVPADPPTAFNKDKLNSFITQYSTGQVSVEIEWELQKENSKRWNPEIQYTSNYYKSNNVEFAVSTEGVYSEPRPIGTRYLTRNL

SEQ ID NO: 87 - protein, 736 aa, Adeno-associated virus
MAADGYLPDWLEDTLSEGIRQWWKLKPGPPPPKPAERHKDDSRGLVLPGYKYLGPGNGLDKGEPVNAADAAALEHDKAYDQQLKAGDNPYLKYNHADAEFQERLKEDTSFGGNLGRAVFQAKKRLLEPLGLVEEAAKTAPGKKRPVEQSPQEPDSSAGIGKSGSQPAKKKLNFGQTGDTESVPDPQPIGEPPAAPSGVGSLTMASGGGAPVADNNEGADGVGSSSGNWHCDSQWLGDRVITTSTRTWALPTYNNHLYKQISNSTSGGSSNDNAYFGYSTPWGYFDFNRFHCHFSPRDWQRLINNNWGFRPKRLNFKLFNIQVKEVTDNNGVKTIANNLTSTVQVFTDSDYQLPYVLGSAHEGCLPPFPADVFMIPQYGYLTLNDGSQAVGRSSFYCLEYFPSQMLRTGNNFQFSYEFENVPFHSSYAHSQSLDRLMNPLIDQYLYYLSKTINGSGQNQQTLKFSVAGPSNMAVQGRNYIPGPSYRQQRVSTTVTQNNNSEFAWPGASSWALNGRNSLMNPGPAMASHKEGEDRFFPLSGSLIFGKQGTGRDNVDADKVMITNEEEIKTTNPVATESYGQVATNHQSAQAQAQTGWVQNQGILPGMVWQDRDVYLQGPIWAKIPHTDGNFHPSPLMGGFGMKHPPPQILIKNTPVPADPPTAFNKDKLNSFITQYSTGQVSVEIEWELQKENSKRWNPEIQYTSNYYKSNNVEFAVNTEGVYSEPRPIGTRYLTRNL

SEQ ID NO: 88 - protein, 735 aa, Adeno-associated virus
MAADGYLPDWLEDTLSEGIRQRWKLKPGPPPPEPAERHKDDSRGLVLPGYKYLGPFNGLDKGEPVNEADAAALEHDKAYDRQLDSGDNPYLKYNHADAEFQERLKEDTSFGGNLGRAVFQAKKRVLEPLGLVEEPVKTAPGKKRPVEHSPVEPDSSSGTGKAGQQPARKRLNFGQTGDADSVPDPQPLGQPPAAPSGLGTNTMATGSGAPMADNNEGADGVGNSSGNWHCDSTWMGDRVITTSTRTWALPTYNNHLYKQISSQSGASNDNHYFGYSTPWGYFDFNRFHCHFSPRDWQRLINNNWGFRPKRLNFKLFNIQVKEVTQNDGTTTIANNLTSTVQVFTDSEYQLPYVLGSAHQGCLPPFPADVFMVPQYGYLTLNNESQAVGRSSFYCLEYFPSQMLRTGNNFTFSYTFEDVPFHSSYAHSQSLGRLMNPLIDQYLYYLSRTNTPSGTTTQSRLQFSQAGASDIRDQSRNWLPGPCYRQQRVSKTSADNNNSEYSWTGATKYHLNGRDSLVNPGPAMASHKDDEEKFFPQSGVLIFGKQGSEKTNVDIEKVMITDEEEIRTTNPVATEQYGSVSTNLQRGNRQAATADVNTQGVLPGMVWQDRDVYLQGPIWAKIPHTDGHFHPSPLMGGFGLKHPPPQILIKNTPVPANPSTTFSAAKFASFITQYSTGQVSVEIEWELQKENSKRWNPEIQYTSNYNKSVNVDFTVDTNGVYSEPRPIGTRYLTRNL

SEQ ID NO: 89 - protein, 738 aa, Adeno-associated virus
MAADGYLPDWLEDNLSEGIREWWDLKPGAPKPKANQQKQDDGRGLVLPGYKYLGPFNGLDKGEPVNAADAAALEHDKAYDQQLKAGDNPYLRYNHADAEFQERLQEDTSFGGNLGRAVFQAKKRVLEPLGLVEEAAKTAPGKKRPVEPSPQRSPDSSTGIGKKGQQPAKKRLNFGQTGDSESVPDPQPIGEPPAGPSGLGSGTMAAGGGAPMADNNEGADGVGSSSGNWHCDSTWLGDRVITTSTRTWALPTYNNHLYKQISNGTSGGSTNDNTYFGYSTPWGYFDFNRFHCHFSPRDWQRLINNNWGFRPKRLSFKLFNIQVKEVTQNEGTKTIANNLTSTIQVFTDSEYQLPYVLGSAHQGCLPPFPADVFMIPQYGYLTLNNGSQAVGRSSFYCLEYFPSQMLRTGNNFEFSYTFEDVPFHSSYAHSQSLDRLMNPLIDQYLYYLSRTQSTGGTQGTQQLLFSQAGPANMSAQAKNWLPGPCYRQQRVSTTLSQNNNSNFAWTGATKYHLNGRDSLVNPGVAMATHKDDEERFFPSSGVLMFGKQGAGRDNVDYSSVMLTSEEEIKTTNPVATEQYGVVADNLQQTNTGPIVGNVNSQGALPGMVWQNRDVYLQGPIWAKIPHTDGNFHPSPLMGGFGLKHPPPQILIKNTPVPADPPTTFSQAKLASFITQYSTGQVSVEIEWELQKENSKRWNPEIQYTSNYYKSTNVDFAVNTEGTYSEPRPIGTRYLTRNL

SEQ ID NO: 90 - protein, 738 aa, Adeno-associated virus
MAADGYLPDWLEDNLSEGIREWWDLKPGAPKPKANQQKQDDGRGLVLPGYKYLGPFNGLDKGEPVNAADAAALEHDKAYDQQLKAGDNPYLRYNHADAEFQERLQEDTSFGGNLGRAVFQAKKRVLEPLGLVEEGAKTAPGKKRPVEPSPQRSPDSSTGIGKKGQQPARKRLNFGRTGDSESVPDPQPIGEPPAAPSSVGSGTMAAGGGAPMADNNEGADGVGSSSGNWHCDSTWLGDRVITTSTRTWALPTYNNHLYKQISNGTSGGSTNDNTYFGYSTPWGYLDFNRFHCHFSPRDWQRLINNNWGFRPKRLSFKLFNIQVKEVTQNEGTKTIANNLASTIQVFTDSEYQPPYVLGSAHQGCLPPFPADVFMIPQYGYLTLNNGSQAVGRSSFYCLEYFPSQMLRTGNNFSFSYTFEDVPFHSSYAHSQSLDRLMNPLIDQYLYYLSRTQSTGGTAGTQQLLFSRAGPSNMSAQARNWLPGPCYRQQRVSTTLSQNNNSNFAWTGATKYHLNGRDSLVNPGVAMATNKDDEDRFFPSSGILMFGKQGAGKDNVDYSNVMLTSEEEIKTTNPVATEQYGVVADNLQQQNTAPTVGAVNSQGALPGMVWQNRDVYLQGPIWAKIPHTDGNFHPSPLMGGFGLKHPPPQILIKNTPVPADPPTAFNQAKLNSFIAQYSTGQVSVEIEWELQKENSKRWNPEIQYTSNYYKSTNADFAVNTEGVYSEPRPIGTRYLTRNL

SEQ ID NO: 91 - protein, 738 aa, Adeno-associated virus
MAADGYLPDWLEDNLSEGIREWWDLKPGAPKPKANQQKQDDGRGLVLPGYKYLGPFNGLDKGEPVNAADAAALEHDKAYDQQLKAGDNPYLRYNHADAEFQERLQEDTSFGGNLGRAVFQAKKRVLEPLGPVEEAAKTAPGKKRPVEPPPQRSPDSSTGIGKKGQQPAKKRLNFGQTGDSESVPDPQPIGEPPAGPSGLGSGTMAAGGGAPMADNNEGADGVGSSSGNWHCDSTWLGDRVITTSTRTWALPTYNNHLYKQISNGTSGGSTNDNTYFGYSTPWGYFDFNRFHCHFSPRDWQRLINNNWGFRPKRLSFKLFNIQVKEVTQNEGTKTVANNLTSTIQVFTDSEYQLPYVLGSAHQGCLPPFPADVFMIPQYGYLTLNNGSQAVGRSSFYCLEYFPSQMLRTGNNFEFSYTFEDVPFHSSYAHSQSLDRLMNPLIDQYLYYLSRTQSTGGTQGTQQLLFSQAGPANMSAQAKNWLPGPCYRQQRVSTTLSQNNNSNFAWTGATKYHLNGRDSLVNPGVAMATHKDDEERFFPSSGVLMFGKQGAGRDNVDYSSVMLTSEEEIKTTNPVATEQYGVVADNLQQTNTGPIVGNVNSQGALPGMVWQNRDVYLQGPIWAKIPHTDGNFHPSPLMGGFGLKHPPPQILIKNTPVPADPPTTFSQAKLASFITQYSTGQVSVEIEWELQKENSKRWNPEIQYTSNYYKSTNVDFAVNTEGTYSEPRPIGTRYLTRNL

SEQ ID NO: 92 - protein, 738 aa, Adeno-associated virus
MAADGYLPDWLEDNLSEGIREWWDLKPGAPKPKANQQKQDDGRGLVLPGYKYLGPFNGLDKGEPVNAADAAALEHDKAYDQQLKAGDNPYLRYNHADAEFQERLQEDTSFGGNLGRAVFQAKKRVLEPLGLVEEAAKTAPGKKRPVEPSPQRSPDSSTGIGKKGQQPAKKRLNFGQTGDSESVPDPQPIGEPPAGPSGLGSGTMAAGGGAPMADNNEGADGVGSSSGNWHCDSTWLGDRVITTSTRTWALPTYNNHLYKQISNGTSGGSTNDNTYFGYSTPWGYFDFNRFHCHFSPRDWQRLINNNWGFRPKRLSFKLFNIQVKEVTQNEGTKTIANNLTSTIQVFTDSEYQLPYVLGSAHQGCLPPFPADVFMIPQYGYLTLNNGSQAVGRSSFYCLEYFPSQMLRTGNNFEFSYTFEDVPFHSSYAHSQSLDRLMNPLIDQYLYYLSRTQSTGGTQGTQQLLFSQAGPANMSAQAKNWLPGPCYRQQRVSTTLSQSNNSNFAWTGATKYHLNGRDSLVNPGVAMATHKDDEERFFPSSGVLMFGKQGAGRDNVDYSSVMLTSEEEIKTTNPVATEQYGVVADNLQQTNTGPIVGNVNSQGALPGMVWQNRDVYLQGPIWAKIPHTDGNFHPSPLMGGLGLKHPPPQILIKNTPVPADPPTTFSQAKLASFITQYSTGQVSVEIEWELQKENSKRWNPEIQYTSNYYKSTNVDFAVNTEGTYSEPRPIGTRYLTRNL

SEQ ID NO: 93 - protein, 737 aa, Adeno-associated virus
MAADGYLPDWLEDNLSEGIREWWDLKPGAPKPKANQQKQDDGRGLVLPGYKYLGPFNGLDKGEPVNAADAAALEHDKAYDQQLKAGDNPYPRYNHADAEFQERLQEDTPFGGNLGRAVFQAKKRVLEPLGLVEEAAKTAPGKKRPVEPSPQRSPDSSTGIGKKGQQPAKKRLNFGQTGDSESVPDPQPIGEPPAGPSGLGSGTMAAGGGAPMADNNEGADGVGNASGNWHCDSTWLGDRVITTSTRTWALPTYNNHLYKQISSASTGASNDNHYFGYSTPWGYFDFNRFHCHFSPRDWQRLINNNWGFRPKRLNFKLFNIQVKEVTTNDGVTTIANNLTSTVQVFSDSEYQLPYVLGSAHQGCLPPFPADVFMIPQYGYLTLNNGSQAVGRSSFYCLEYFPSQMLRTGNNFTFSYTFEEVPLHSSYAHSQSLDRLMNPLIVQYLYYLNRTQNQSGSAQNKDLLFSRGSPAGMSVQPKNWLPGPCYRQQRVSKTKTDNNNSNFTWTGASKYNLNGRESIINPGTAMASHKDDEDKFFPMSGVMIFGKESAGASNTALDNVMITDEEEIKATNPVATERFGTVAVNFQSSSTDPATGDVHAMGALPGMVWQDRDVYLQGPIWAKIPHTDGHFHPSPLMGGFGLKNPPPQILIKNTPVPANPPAEFSATKFASFITQYSTGQVSVEIEWELQKENSKRWNPEVQYTSNYAKSASVDFTVDNNGLYTEPRPIGTRYLTRPL

SEQ ID NO: 94 - protein, 736 aa, Adeno-associated virus
MAADGYLPDWLEDTLSEGIRQWWKLRPGPPPPKPAERHKDDSRGLVLPGYKYLGPFNGLDKGEPVNEADAAALEHDKAYDRQLDSGDNPYLKYNHADAEFQERLKEDTSFGGNLGRAVFQAKKRVLEPLGLVEEGAETAPGKKRPVEQSPQGPDSSSGIGKTGQQPAKKRLNFGQTGDSESVPDPQPLGEPPATPAAVGPTTMASGGGAPMADNNEGADGVGNASGNWHCDSTWLGDRVITTSTRTWALPTYNNHLYKQISSASTGASNDNHYFGYSTPWGYFDFNRFHCHFSPRDWQRLINNNWGFRPKRLNFKLFNIQVKEVTTNDGVTTIANNLTSTVQVFSDSEYQLPYVLGSAHQGCLPPFPADVFMIPQYGYLTLNNGSQAVGRSSFYCLEYFPSQMLRTGNNFTFSYTFEEVPFHSSYAHSQSLDRLMNPLIDQYLYYPNRTQNQSGSAQNKDLLFSRGSPAGMSVQPKNWLPGPCYRQQRVSKTKTDNNNSNFTWTGASKYNLNGRESIINPGTAMASHKDDEDKFFPMSGVMIFGKESAGASNTALDNVMITDEEEIKATNPVATERFGTVAVNFQSSSTDPATGDVHAMGALPGMVWQGRDVYLQGPIWAKIPHTDGHFHPSPLMGGFGLKNPPPQILIKNTPVPANPPAEFSATKFASFITQYSTGQVSVEIEWELQKENSKRWNPEVQYTSNYAKSANVDFTVDNNGLYTEPRPIGTRYLTRPL

SEQ ID NO: 95 - protein, 735 aa, Adeno-associated virus
MAADGYLPDWLEDTLSEGIRQWWKLKPGPPPPKPAERHRDDSRGLVLPGYKYLGPFNGLDKGEPVNEADAAALEHDKAYDRQLDSGDNPYLKYNHADAEFQERLKEDTSFGGNLGRAVFQAKKRVLEPLGLVEEPVKTAPGKKRPVEHSPVEPDSSSGTGKAGQQPARKRLNFGQTGDADSVPDPQPLGQPPAAPSGLGTNTMATGSGAPMADNNEGADGVGNSSGNWHCDSTWMGDRVITTSTRTWALPTYNNHLYKQISSQSGASNDNHYFGYSTPWGYFDFNRFHCHFSPRDWQRLINNNWGFRPKRLNFKLFNIQVKEVTQNDGTTTIANNLTSTVQVFTDSGYQLPYVLGSAHQGCLPPFPADVFMVPQYGYPTLNNGSQAVGRSSFYCLEYFPSQMLRTGNNFTFSYTFEDVPFHSSYAHSQSLDRLMNPLIDQYLYYLSTTNTPSGTTTQSRLQFSQAGASDIRDQSRNWLPGPCYRQQRVSKTSADNNNSEYSWTGATKYHLNGRDSLVNPGPAVASHKDDEEKFFPQSGVLIFGKQGSEKTNVDIEKVMITDEEEIRTTNPVATEQYGSVSTNLQRGNRQAATADVNTQGVLPGMVWQDRDVYLQGPIWAKIPHTDGHFHPSPLMGGFGLKHPPPQILIKNTPVPANPSTTFSAAKFASFITQYSTGQVSVEIEWELQKENSKRWNPEIQYTSNYNKSVNVDFTVDTNGVYSEPRPIGTRYLTRNL

SEQ ID NO: 96 - protein, 736 aa, Adeno-associated virus
MAADGYLPDWLEDTLSEGIRQWWKLKPGPPPPKPAERHKDDSRGLVLPGYKYLGPFNGLDKGEPVNEADAAALEHDKAYDRQLDSGDNPYLKYNHADAEFQERLKEDTSFGGNLGRAVFQAKKRVLEPLGLVEEGAKTAPGKKRPVEQSPQEPDSPSGIGKTGQQPAKKRLNFGQTGDSESVPDPQPLGEPPATPAAVGPTTMASGGGAPMADNNEGADGVGNASGNWHCDSTWLGDRVITTSTRTWALPTYNNHLYKQISSASTGASNDNHYFGYSTPWGYFDFNRFHCHFSPRDWQRLINNNWGFRPKRLNFKLFNIQVKEVTTNDGVTTIANNLTSTVQVFSDSEYQLPYVLGSAHQGRLPPFPADVFMIPQYGYLTLNNGSQAVGRSSSYCLEYFPSQMLRTGNNFTFSYTFEEVPLHSSCAHSQSLDRLMNPLIDQYLYYLNRTQNQSGSAQNRDLLFSRGSPAGMSVQPKNWLPGPCYRQQRVSKTKTDNNNSNFTWTGASKYNLNGRESIINPGTAMASHKDDEDKFFPMSGVMIFGKESAGASNTALDNVMITDEEEIKATNPVATERFGTVAVNFQSSSTDPATGDVHAMGALPGMVWQDRDVYLQGPIWAKIPHTDGHFHPSPLMGGFGLKNPPPQILIKNTPVPANPPAEFSATKFASFITQYSAGQVSVEIEWELQKENSKRWNPEVQYTSNYAKSANVDFTVDNNGLYTEPRPIGTRYLTRPL

SEQ ID NO: 97 - protein, 735 aa, Adeno-associated virus
MAADGYLPDWLEDTLSEGIRQWWKLKPGPPPPKPAERHRDDSRGLVLPGYKYLGPFNGLDKGEPVNEADAAALEHDKAYDRQLDSGDNPYLKYNHADAEFQERLKEDTSFGGNLGRAVFQAKKRVLEPLGLVGEPVKTAPGKKRPVEHSPVEPDSSSGTGKAGQQPARKRLNFGQTGDADSVPDPQPLGQPPAAPSGLGTNTMATGSGAPMADNNEGADGVGNSSGNWHCDSTWMGDRVITTSTRTWALPTYNNHLYKQISSQSGASNDSHYFGYSTPWGYFDFNRFHCHFSPRDWQRLINNNWGFRPKRLNFKLFNIQVKEVTQNDGTTTIANNLTSTVQVFTDSEYQLPYVLGSAHQGCLPPFPADVFMVPQYGYLTLNNGSQAVGRSSFYCLEYFPSQMLRTGNNFTFSYTFEDVPFHSSYAHSQSLDRLMNPLIDQYLYYLSTTNTPSGTTTQSRLQFSQAGASDIRDQSRNWLPGPCYRQQRVSKTSADNNNSEYSWTGATKYHLNGRDSLVNPGPAMASHKDNEEKFFPQSGVLIFGKQGSEKTNVDIEKVMITDEEEIRTTNPVATEQYGSVSTNLQRGNRQAATADVNTQGVLPGMVWQDRDVYLQGPIWAKIPHTDGHFHPSPLMGGFGLKHPPPQILIKNTPVPANPSTTFSAAKFASFITQYSTGQVSVEIEWELQKENSKRWNPEIQYTSNYNKSVNVDFTVDTNGVYSEPRPIGTRYLTRNL

SEQ ID NO: 98 - protein, 736 aa, Adeno-associated virus
MAADGYLPDWLEDNLSEGIREWWDLKPGAPKPKANQQKQDDGRGLVLPGYKYLGPFNGLDKGEPVNAADAAALEHDKAYDQQLKAGDNPYLRYNHADAEFQERLQEDTSFGGNLGRAVFQAKKRVLEPLGLVEEGAKTAPGKKRPVEQSPQEPDSSSGIGKTGQQPAKKRLNFGQTGDSESVPDPQPLGEPPATPAAVGPTTMASGGGAPMADNNEGADGVGNASGNWHCDSTWLGDRVITTSTRTWALPTYNNHLYKQISSTSTGASNDNHYFGYGTPWGYFDFNRFHCHFSPRDWQRLINNNWGFRPKRLNFKLFNIQVEEVTTNDGVTTIANNLTSTVQVFSDSEYQLPYVLGSAHQGCLPPFPADVFMIPQYGYLTLNNGSQAVGRSSFYCLEYFPSQMLRTGNNFTFSYTFEEVPFHSSYAHSQSLDRLMNPLIDQYLYYLNRTQNQSGSAQNKDLLFSRGSPAGMSVQPKNWLPGPCYRQQRVSKTKTDNNNSNFTWTGASKYNLNGRESIINPGTAVASHKDDEDKFFPMSGVMIFGKESAGASSTALDNVMITDEEEIKATNPVATERFGTVAVNFQSSSTDPATGDVHAMGALPGMVWQDRDVYLQGPIWAKIPHTDGHFHPSPLMGGFGLKNPPPQILIKNTPVPANPPAEFSATKFASFITQYSTGQVSVEIEWELQKENSKRWNPEVQYTSNYAKSANVDFTVDNNGLYTEPRPIGTRYLTRPL

SEQ ID NO: 99 - protein, 735 aa, Adeno-associated virus
MAADGYLPDWLEDTLSEGIRQWWKLKPGPPPPKPAERHKDDSRGLVLPGYKYLGPFNGLDKGEPVNEADAAALEHDKAYDRQLDSGDNPYLKYNHADAEFQERLKEDTSFGGNLGRAVFQAKKRVLEPLGLVGEPVKTAPGKKRPVEHSPVEPDSSSGTGKAGQQPARKRLNFGQTGDADSVPDPQPLGQPPAAPSGLGTNTMATGSGAPMADNNEGADGVGNSSGNWHCDSTWMGDRVITTSTRTWALPTYNNHLYKQISSQSGASNDNHYFGYSTPWGYFDFNRFHCHFSPRDWQRLINNNWGFRPKRLNFKLFNIQVKEVTQNDGTTTIANNLTSTVQVFTDSEYQLPYVLGSAHQGCLPPFPADVFMVPQYGYLTLNNGSQAVGRSSFYCLEYFPSQMLRTGNNFTFSYTFEDVPFHSGYAHSQSLDRLMNPLIDQYLYYLSTTNTPSGTTTQSRLQFSQAGASDIRDQSRNWLPGPCYRQQRVSKTSADNNNSEYSWTGATKYHLNGRDSLVNPGPAMASHKDNEEKFFPQSGVLIFGKQGSEKTNVDIEKVMITDEEEIRTTNPVATEQYGSVSTNLQRGNRQAATADVNTQGVLPGMVWQDRDVYLQGPIWAKIPHTDGHFHPSPLMGGFGLKHPPPQILIKNTPVPANPSTTFSAAKFASFITQYSTGQVSVEIEWELQKENSKRWNPEIQYTSNYNKSVNVDFTVDTNGVYSEPRPIGTRYLTRNL

SEQ ID NO: 100 - protein, 735 aa, Adeno-associated virus
MAADGYLPDWLEDTLSEGIRQWWKLKPGPPPPKPAERHKDDSRGLVLPGYKYLGPFNGLDKGEPVNEADAAALEHDKAYDRQLDSGDNPYLKYNHADAEFQERLKEDTSFGGNLGRAVFQAKKRVLEPLGLVGEPVKTAPGKKRPVEHSPVEPDSSSGTGKAGQQPARKRLNFGQTGDADSVPDPQPLGQPPAAPSGLGTNTMATGSGAPMADNNEGADGVGNSSGNRHCDSTWMGDRVITTSTRTWALPTYNNHLYRQISSQSGASNDNHYFGYSTPWGYFDFNRFHCHFSPRDWQRLINNNWGFRPKRLNFKLFNIQVKEVTQNDGTTTIANNLTSTVQVFTDSEYQLPYVLGSAHQGCLPPFPADVFMVPQYGYLTLSNGSQAVGRSSFYCPEYFPSQMLRTGNNFTFSYTFEDVPFHSSYAHSQSLDRLMNPLIDQYLYYLSTTNTPSGTTTQSRLQFSQAGASDIRDQSRNWLPGPCYRQQRVSKTSADNNNSEYSWTGATKYHLNGRDSLVNPGPAMASHKDNEEKFFPQSGVLIFGKQGSEKTNVDIEKVMITDEEEIRTTNPVATEQYGSVSTNLQRGNRQAATADVNTQGVLPGMVWQDRDVYLQGPIWAKIPHTDGHFHPSPLMGGFGPKHPPPQILIKNTPVPANPSTTFSAAKFASFITQYSTGQVSVEIEWELQKENSKRWNPEIQYTSNYNKSVNVDFTVDTNGVYSEPRPIGTRYLTRNL

SEQ ID NO: 101 - protein, 734 aa, Adeno-associated virus
MAADGYLPDWLEDTLSEGIRQWWKLKPGPPPPKPAERHKDDSRGLVLPGYKYLGPFNGLDKGEPVNEADAAALEHDKAYDRQLDSGDNPYLKYNHADAEFQERLKEDTSFGGNLGRAVFQAKKRVLEPLGLVEEPVKTAPGKKRPVEHSPAEPDSSSGTGKAGQQPARKRLNFGQTGDADSVPDPQPLRQPPAAPTSLGSTTMATGSGAPMADNNEGADGVGNSSGNWHCDSQWLGDRVITTSTRTWALPTYNNHLYKQISSQSGASNDNHYFGYSTPWGYFDFNRFHCHFSPRDWQRLINNNWGFRPKRLNFKLFNIQVKEVTQNDGTTTIANNLTSTVQVFTDSEYQLPYVLGSAHQGCLPPFPADVFMVPQYGYLTLNNGSQAVGRSSFYCLEYFPSQMLRTGNNFQFSYTFEDVPFHSSYAHSQSLDRLMNPLIDQYLYYLNRTQTASGTQQSRLLFSQAGPTSMSLQAKNWLPGPCYRQQRLSKQANDNNNSNFPWTGATKYYLNGRDSLVNPGPAMASHKDDEEKFFPMHGTLIFGKEGTNATNAELENVMITDEEEIRTTNPVATEQYGYVSNNLQNSNTAASTETVNHQGALPGMVWQDRDVYLQGPIWAKIPHTDGHFHPSPLMGGFGLKHPPPQIMIKNTPVPANPPTNFSSAKFASFITQYSTGQVSVEIEWELQKENSKRWNPEIQYTSNYNKSVNVDFTVDTNGVYSEPRPIGTRYLTRNL

SEQ ID NO: 102 - protein, 734 aa, Adeno-associated virus
MAADGYLPDWLEDTLSEGIRQWWKLKPGPPPPKPAERHKDDSRGLVLPGYKYLGPFNGLDKGEPVNEADAAALEHDKAYDRQLDSGDNPYLKYNHADAEFQERLKEDTSFGGNLGRAVFQAKKRVLEPLGLVEEPVKTAPGKKRPVEHSPAEPDSSSGTGKAGQQPARKRLNFGQTGDADSVPDPQPLGQPPAAPTSLGSTTMATGSGAPMADNNEGADGVGNSSGNWHCDSQWLGDRVITTSTRTWALPTYNNHLYKQISSQSGASNDNHYFGYSTPWGYFDFNRFHCRFSPRDWQRLINNNWGFRPKRLNFKLFNIQVKEVTQNDGTTTIANNLTSTVQVFTDSEYQLPYVLGSAHQGCLPPFPADVFMVPQYGYLTLNNGSQAVGRSSFYCLEYFPSQMLRTGNNFQFSYTFEDVPFHSSYAHSQGLDRLMNPLIDQYLYYLNRTQTASGTQQSRLLFSQAGPTSMSLQAKNWLPGPCYRQQRLSKQANDNNNSNFPWTGATKYHLNGGDSLVNPGPAMASHKDDEEKFFPMHGTLIFGKEGTNATNAELENVMITDEEEIRTTNPVATEQYGYVSNNLQNSNTAASTETVNHQGALPGMVWQDRDVYLRGPIWAKIPHADGHFHPSPLMGGFGLKHPPPQIMIKNTPVPANPPTNFSSAKFASFITQYSTGQVSVEIEWELQKENSKRWNPEIQYTSNYNKSVNVDFTVDTNGVYSEPRPIGTRYLTRNL

SEQ ID NO: 103 - protein, 734 aa, Adeno-associated virus
MAADGYLPDWLEDTLSEGIRQWWKLKPGPPPPKPAERHKDDSRGLVLPGYKYLGPFNGLDKGEPVNEADAAALEHDKAYDRQLDSGDNPYLKYNHADAEFQERLKEDTSFGGNLGRAVFQAKKRVLEPLGLVEEPVKTAPGKKRPVEHSPAEPDSSSGTGKAGQQPARKRLNFGQTGDADSVPDPQPLGQPPAAPTSLGSTTMATGSGAPMADNNEGADGVGNSSGNWHCDSQWLGDRVITTSTRTWALPTYNNHLYKQISSQSGASNDNHYFGYSTPWGYFDFNRFHCHFSPRDWQRLINNNWGFRPKRLNFKLFNIQVKEVTQNDGTTTIANNLTSTVQVFTDSEYQLPYVLGSAHQGCLPPFPADVFMVPQYGYLTLNNGSQAVGRSSFYCLECFPSQMLRTGNNFQFSYTFEDVPFHSSYAHSQSLDRLMNPLIDQYLYYLNRTQTASGTQQSRLLFSQAGPTSMSLQAKNWLPGPCYRQQRLSKQANDNNNSNFPWTGATKYHLNGRDSLVNPGPAMASHKDDEEKFFPMHGTLIFGKEGTNATNAELENVMITDEEEIRTTNPVATEQYGYVSNNLQNSNTAASTETVNHQGALPGMVWQDRDVYLQGPIWAKIPHTDGHFHPSPLMGGFGLKHPPPQIMIKNTPVPANPPTNFSSAKFASFITQYSTGQVSVEIEWELQKENSKRWNPEIQYTSNYNKSVNVDFTVDTNGVYSEPRPIGTRYLTRNL

SEQ ID NO: 104 - protein, 735 aa, Adeno-associated virus
MAADGYLPDWLEDTLSEGIRQWWKLKPGPPPPKPAERHKDDSRGLVLPGYKYLGPFNGLDKGEPVNEADAAALEHDKAYDRQLDSGDNPYLKYNHADAEFQERLKEDTSFGGNLGRAVFQAKKRVLEPLGLVEEPVKTAPGKKRPVEHSPVEPDSSSGTGKAGNQPARKRLNFGQTGDADSVPDPQPLGQPPASPSGLGTNTMATGSGAPMADNNEGADGVGNSSGNWHCDSTWMGDRVVTTSTRTWALPTYNNHLYKQISSQSGASNDNHYFGYSTPWGYFDFNRFHCHFSPRDWQRLINNNWGFRPKRLNFKLFNIQVKEVTQNDGTTTIANNLTSTVQVFTDLEYQLPYVLGSAHQGCLPPFPADVFMVPQYGYLTLNNGSQAVGRSSFYCLEYFPSQMLRTGNNFTFSYTFEDVPFHSSYAHSQSLDRLMNPLIDQYLYYLSRTNTPSGTTTQSRLQFSQAGASDIRDQSRNWLPGPCYRQQRVSKTAADNNNSEYSWTGATKYHLNGRDSLVNPGPAMASHKDDEEKFFPQSGVLIFGKQGSEKTNVDIEKVMITDEEEIRTTNPVATEQYGSVSTNLQSGNTQAATSDVNTQGVLPGMVWQDRDVYLQGPIWAKIPHTDGHFHPSPLMGGFGLKHPPPQILIKNTPVPANPSTTFSAAKFASFITQYSTGQVSVEIEWELQKENSKRWNPEIQYTSNYNKSVNVDFTVDTNGVYSEPRPIGTRYLTRNL

SEQ ID NO: 105 - protein, 734 aa, Adeno-associated virus
MAADGYLPDWLEDTLSEGIRQWWKLKPGPPPKPAERHKDDSRGLVLPGYKYLGPFNGLDKGEPVNEADAAALEHDKAYDRQLDSGDNPYLKYNHADAEFQERLKEDTSFGGNLGRAVFQAKKRVLEPLGLVEEPVKTAPGKKRPVEHSPVEPDSSSGTGKAGNQPARKRLNFGQTGDADSVPDPQPLGQPPAAPSGLGTNTMATGSGAPMADNNEGADGVGNSSGDWHCDSTWMGDRVITTSTRTWALPTYNNHLYKQISSQSGASNDNHYFGYSTPWGYFDFNRFHCHFSPRDWQRLINNNWGFRPKRLNLKLFNIQVKEVTQNDGTTTIANNLTSTVQVFTDLEYQLPYVLGSAHQGCLPPFPADVFMVPQYGYLTLNNGSQAVGRSSFYCLEYFPSQMLRTGNNFTFSYTFEDVPFHSSYAHSQSLDRLMNPLIDQYLYYLSRTNTPSGTTTQSRLQFSQAGASDIRDQSRNWLPGPCYRQQRVSKTAADNNNGEYSWTGATKYHLNGRDSLVNPGPAMASHKDDEEKFFPQSGVLIFGKQGSEKTNVDIEKVMITDEEEIRTTNPVATEQYGSVSTNLQSGNTRAATSDVNTQGVLPGMVWQDRDVYLQGPIWAKIPHTDGHFHPSPLMGGFGLKHPPPQILIKNTPVPANPSTTFSAAKFASFITQYSTGQVSVEIEWELQKENSKRWNPEIQYTSNYNKSVNVDFTVDTNGVYSEPRPIGTRYLTRNL

SEQ ID NO: 106 - protein, 735 aa, Adeno-associated virus
MAADGYLPDWLEDTLSEGIRQWWKLKPGPPPPKPAERHKDDSRGLVLPGYKYLGPFNGLDKGEPVNEADAAALEHDKAYDRQLDSGDNPYLKYNHADAEFQERLKEDTSFGGNLGRAVFQAKKRVLEPLGLVEEPVKTAPGKKRPVEHSPVEPDSSSGTGKAGQQPARKRLNFGQTGDADSVPDPQPLGQPPAAPSGLGSTTMATGSGAPMADNNEGADGVGNSSGNWHCDSQWLGDRVITTSTRTWALPTYNNHLYKQISSQSGASNDNHYFGYSTPWGYFDFNRFHCHFSPRDWQRLINNNWGFRPKRLNFKLFNIQVKEVTQNDGTTTIANNLTSTVQVFTDSEYQLPYVLGSAHQGCLPPFPADVFMVPQYGYLTLNNGSQAVGRSSFYCLEYFPSQMLRTGNNFQFSYTFEDVPFHSSYAHSQSLDRLMNPLVDQYLYYLNKTQTNSGTLQQSRLLFSQAGPTNMSLQAKNWLPGPCYRQQRLSKQANDNNNSNFPWTAATKYHLNGRDSLVNPGPAMASHKDDEEKFFPMHGTLIFGKQGTNANDADLENVMITDEEEIRTTNPVATEQYGTVSNNLQNSNTGPTTGTVNHQGALPGMVWQDRDVYLQGPIWAKIPHTDGHFHPSPLMGGFGLKHPPPQIMIKNTPVPANPPTNFSSAKFASFITQYSTGQVSVEIEWELQKENSKRWNPEIQYTSNYNKSVNVDFTVDTNGVYSEPRPIGTRYLTRNL

SEQ ID NO: 107 - protein, 735 aa, Adeno-associated virus
MAADGYLPDWLEDTLSEGIRQWWKLKPGPPPPKPAERHKDDSRGLVLPGYKYLGPFNGLDKGEPVNEADAAALEHDKAYDRQLDSGDNPYLKYNHADAEFQERLKEDTSFGGNLGRAVFQAKKRVLEPLGLVEEPVKTAPGKKRPVEHPPVEPDSSSGTGKAGQQPARKRLNFGQTGDADSVPDPQPLGQPPAAPSGLGSTTMATGSGAPMADNNEGADGVGNSSGNWHCDSQWLGDRVITTSTRTWALPTYNNHLYKQISSQSGASNDNHYFGYSTPWGYFDFNRFHCHFSPRDWQRLINNNWGFRPKRLNFKLFNIQVKEVTQNDGTTTIANNLTSTVQVFTDSEYQLPYVLGSAHQGCLPPFPADVFMVPQYGYLTLNNGSQAVGRSSFYCLEYFPSQMLRTGNNFQFSYTFEDVPFHSSYAHSQSLDRLMNPLIDQYLYYLNKTQTNSGTLQQSRLLFSQAGPTNMSLQAKNRLPGPCYRQQRLSKQANDNNNSNFPWTAATKYHLNGRDSLVNPGPAMASHKDDEEKFFPMHGTLIFGKQGTNANDADLENVMITDEEEIRTTNPVATEQYGTVSNNLQNSNTGPTTGTVNHQGALPGMVWQDRDVYLQGPIWAKIPHTDGHFHPSPLVGGFGLKHPPPQIMIKNTPVPANPPTNFSSAKFASFITQYSTGQVSVEIEWELQKENSKRWNPEIQYTSNYNKSVNVDFTVDTNGVYSEPRPIGTRYLTRNL

SEQ ID NO: 108 - protein, 735 aa, Adeno-associated virus
MAADGYLPDWLEDTLSEGIRQWWKLKPGPPPPKPAERHKDDSRGLVLPGYKYLGPFNGLDKGEPVNEADAAALEHDKAYDRQLDSGDNPYPKYNHADAEFQERLKEDTSFGGNLGRAVFQAKKRVLEPLGLVEEPVKTAPGKKRPVEHSPAEPDSSSGTGKAGQQPARKRLNFGQTGDADSVPDPQPLGQPPAAPSGLGTNTMATGSGAPMADNNEGADGVGNSSGNWHCDSTWMGDRVITTSTRTWALPTYNNHLYKQISSQSGASNDNHYFGYSTPWGYFDFNRFHCHFSPRDWQRLINNNWGFRPKRLNFKLFNIQVKEVTQNDGTTTIANNLTSTVQVFTDSEYQLPYVLGSAHQGCLPPFPADVFMVPQYGYLTLNNGSQAVGRSSFYCLEYFPSQMLRTGNNFTFSYTFEDVPFHSSYAHSQSLDRLMNPLIDQYLYYLSRTNTPSGTTTQSRLQFSQAGASDIRDQSRNWLPGPCYRQQRVSKTSADNNNSEYSWTGATKYHLNGRDSLVNPGPAMASHKDDEEKFFPQSGVLIFGKQDSGKTNVDIEKVMITDEEEIRTTNPVATEQYGSVSTNLQSGNTQAATSDVNTQGVLPGMVWQDRDVYLQGPIWAKIPHTDGHFHPSPLMGGFGLKHPPPQILIKNTPVPANPSTTFSAAKFASFITQYSTGQVSVEIEWELQKENSKRWNPEIQYTSNYNKSVNVDFTVDTNGVYSEPRPIGTRYLTRNL

SEQ ID NO: 109 - protein, 738 aa, Adeno-associated virus
MAADGYLPDWLEDNLSEGIREWWDLKPGAPKPKANQQKQDDGRGLVLPGYKYLGPFNGLDKGEPVNAADAAALEHDKAYDQQLKAGDNPYLRYNHADAEFQERLQEDTSFGGNLGRAVFQAKKRVLEPLGLVEEAAKTAPGKKRPVEPSPQRSPDSSAGIGKKGQQPAKKRLNFGQTGDSESVPDPQPIGEPPAGPSGLGSGTMAAGGGAPMADNNEGADGVGSSSGNWHCDSTWLGDRVITTSTRTWALPTYNNHLYKQISNGTSGGSTNDNTYFGYSTPWGYFDFNRFHCHFSPRDWQRLINNNWGFRPKRLSFKLFNIQVKEVTQNEGTETIANNLTSTIQVFTDSEYQLPYVLGSAHQGCLPPFPADVFMIPQYGYLTLNNGSQAVGRSSFYCLEYFPSQMLRTGNNFEFSYTFEDVPFHSSCAHSQSSDRLMNPLIDQYLYYLSRTRSTGGTQGTQQLLFSQAGPANMSAQAKNWLPGPCYRQQRVSTTLSQNNNSNFAWTGATKYHLNGRDSLVNPGVAMATHKDDEERFFPSSGVLMFGKQGAGRDNVDYSSVMLTSEEEIKTTNPVATEQYGVVADNLQQTNTGPIVGNVNSQGALPGMVWQNRDVYLQGPIWAKIPHTDGNFHPSPLMGGFGLKHPPPQILIKNTPVPADPPTTFSQAKLASFITQYSTGQVSVEIEWELQKENSKRWNPEIQYTSNYYKSTNVDFAVNTEGTYSEPRPIGTRYLTRNL

SEQ ID NO: 110 - protein, 738 aa, Adeno-associated virus
MAADGYLPDWLEDNLSEGIREWWDLKPGAPKPKANQQKQDDGRGLVLLGYKYLGPFNGLDKGEPVNAADAAALEHDKAYDQQLKAGDNPYLRYNHADAEFQERLQEDTSFGGNLGRAVFQAKKRVLEPLGLVEEAAKTAPGKKRPVEPSPQRSPDSSTGIGKKGQQPAKKRLNFGQTGDSESVPDPQPIGEPPAGPSGLGSGTMAAGGGAPMADNNEGADGVGSSSGNWHCDSTWLGDRVITTSTRTWALPTYNNHLYKQISNGTSGGSTNDNTYFGYSTPWGYFDFNRFHCHFSPRDWQRLINNNWGFRPKRLSFKLFNIQVKEVTQNEGTKTIANNLTSTIQVFTDSEYQLPYVLGSAHQGCLPPFPADVFMIPQYGYLTLNNGSQAVGRSSFYCLEYFPSQMLRTGNNFEFSYTFEDVPFHSGYAHSQSLDRLMNPLIDQYLYYLSRTQSTGGTQGTQQLLFSQAGPANMSAQAKNWLPGPCYRQQRVSTTLSQNNNSNFAWTGATKYHLNGRDSLVNPGVAMATHKDDEERFFPSSGVLMFGKQGAGRDNVDYSSVMLTSEEEIKTTNPVATEQYGVVADNLQQTNTGPIVGNVNSQGALPGMVWQNRDVYLQGPIWAKIPHTDGNFHPSPLMGGFGLKHPPPQILIKNTPVPADPPTTFSQAKLASFITQYSTGQVSVEIEWELQKENSKRWNPEIQYTSNYYKSTNVDFAVNTEGTYSEPRPIGTRYLTRNL

SEQ ID NO: 111 - protein, 738 aa, Adeno-associated virus
MAADGYLPDWLEDNLSEGIREWWDLKPGAPKPKANQQKQDDGRGLVLPGYKYLGPFNGLDKGEPVNAADAAALEHDKAYDQQLKAGDNPYLRYNHADAEFQERLQEDTSFGGNLGRAVFQAKKRVLEPLGLVEEGAKTAPGKKRPVEPSPQRSPDSSTGIGKKGQQPAKKRLNFGQTGDSESVPDPQPIGEPPAGPSGLGSGTMAAGGGAPMADNNEGADGVGSSSGNWHCDSTWLGDRVITTSTRTWALPTYNNHLYKQISNGTSGGSTNDNTYFGYSTPWGYFDFNRFHCHFSPRDWQRLINNNWGFRPKRLNFKLFNIQVKEVTQNEGTKTIANNLTSTIQVFTDSEYQLPYVLGSAHQGCLPPFPADVFMIPQYGYLTLNNGSQAVGRSSFYCLEYFPSQMLRTGNNFEFSYQFEDVPFHSSYAHSQSLDRLMNPLIDQYLYYLSRTQSTGGTAGTQQLLFSQAGPNNMSAQAKNWLPGPCYRQQRVSTTLSQNNNSNFAWTGATKYHLNGRDSLVNPGVAMATHKDDEERFFPSSGVLMFGKQGAGKDNVDYSSVMLTSEEEIKTTNPVATEQYGVVADNLQQQNAAPIVGAVNSQGALPGMVWQNRDVYLQGPIWAKIPHTDGNFHPSPLMGGFGLKHPPPQILIKNTPVPADPPTTFSQAKLASFITQYSTGQVSVEIEWELQKENSKRWNPEIQYTSNYYKSTNVDFAVNTDGTYSEPRPIGTRYLTRNL

SEQ ID NO: 112 - protein, 728 aa, Adeno-associated virus
MAADGYLPDWLEDNLSEGIREWWDLKPGAPKPKANQQKQDDGRGLVLPGYKYLGPFNGLDKGEPVNEADAAALEHDKAYDKQLEQGDNPYLKYNHADAEFQERLQEDTSFGGNLGRAVFQAKKRVLEPLGLVEEGAKTAPGKKRPIESPDSSTGIGKKGQQPAKKKLNFGQTGDSESVPDPQPLGEPPAAPSGLGSGTMAAGGGAPMADNNEGADGVGNASGNWHCDSTWLGDRVITTSTRTWALPTYNNHLYKQISSQSGATNDNHFFGYSTPWGYFDFNRFHCHFSPRDWQRLINNNWGFRPRKLRFKLFNIQVKEVTTNDGVTTIANNLTSTIQVFSDSEYQLPYVLGSAHQGCLPPFPADVFMIPQYGYLTLNNGSQSVGRSSFYCLEYFPSQMLRTGNNFEFSYTFEEVPFHSSYAHSQSLDRLMNPLIDQYLYYLARTQSTTGSTRELQFHQAGPNTMAEQSKNWLPGPCYRQQRLSKNIDSNNNSNFAWTGATKYHLNGRNSLTNPGVAMATNKDDEDQFFPINGVLVFGETGAANKTTLENVLMTSEEEIKTTNPVATEEYGVVSSNLQSSTAGPQTQTVNSQGALPGMVWQNRDVYLQGPIWAKIPHTDGNFHPSPLMGGFGLKHPPPQILIKNTPVPANPPEVFTPAKFASFITQYSTGQVSVEIEWELQKENSKRWNPEIQYTSNYAKSNNVEFAVNNEGVYTEPRPIGTRYLTRNL

SEQ ID NO: 113 - protein, 735 aa, Adeno-associated virus
MAADGYLPDWLEDNLSEGIREWWDLKPGAPKPKANQQKQDDGRGLVLPGYKYLGPFNGLDKGEPVNEADAAALEHDKAYDKQLEQGDNPYLKYNHADAEFQERLQEDTSFGGNLGRAVFQAKKRVLEPLGLVEEGAKTAPGKKRPVEPSPQRSPDSSTGIGKTGQQPAKKRLNFGQTGDSESVPDPQPIGEPPAGPSGLGSGTMAAGGGAPMADNNEGADGVGSSSGNWHCDSTWLGDRVITTSTRTWALPTYNNHLYKQISNGTSGGSTNDNTYFGYSTPWGYFDFNRFHCHFSPRDWQRLINNNWGFRPRKLRFKLFNIQVKEVTTDDGVTTIANNLTSTIQVFSDSEYQLPYVLGSAHQGCLPPFPADVFMIPQYGYLTLNNGSQSVGRSSFYCLEYFPSQMLRTGNNFEFSYTFEEVPFHSSYAHSQSLDRLMNPLIDQYLYYLARTQSTTGSTRELQFHQAGPNTMAEQSKNWLPGPCYRQQRLSKNIDSNNNSNFAWTGATKYHLNGRNSLTNPGVAMATNKDDEDQFFPINGVLVFGKTGAANKTTLENVLMTSEEEIKTTNPVATEEYGVVSSNLQSSTAGPQTQTVNSQGALPGMVWQNRDVYLQGPIWAKIPHTDGNFHPSPLMDGFGLKHPPPQILIKNTPVPANPPEVFTPAKFASFITQYSTGQVSVEIEWELQKENSKRWNPEIQYTSNYAKSNNVEFAVNNEGVYTEPRPIGTRYLTRNL

SEQ ID NO: 114 - protein, 728 aa, Adeno-associated virus
MAADGYLPDWLEDNLSEGIREWWDLKPGAPKPKANQQKQDDGRGLVLPGYKYLGPFNGLDKGEPVNAADAAALEHDKAYDQQLKAGDNPYLRYNHADAEFQERLQEDTSFGGNLGRAVFQAKKRVLEPLGLVEEGAKTAPGKKRPIESPDSSTGIGKKGQQPAKKKLNFGQTGDSESVPDPQPIGEPPAGPSGLGSGTMAAGGGAPMADNNEGADGVGNASGNWHCDSTWLGDRVITTSTRTWALPTYNNHLYKQISSQSGATNDNHFFGYSTPWGYFDFNRFHCHFSPRDWQRLINNNWGFRPRKLRFKLFNIQVKEVTTNDGVTTIANNLTSTIQVFSDSEYQLPYVLGSAHQGCLPPFPADVFMIPQYGYLTLNNGSQSVGRSSFYCLEYFPSQMLRTGNNFEFSYTFEEVPFHSSYAHSQSLDRLMNPLIDQYLYYLARTQSTTGSTRELQFHQAGPNTMAEQSKNWLPGPCYRRQRLSKDIDSNNNSNFAWTGATKYHLNGRNSLTNPGVAMATNKDDEDQFFPINGVLVFGKTGAANKTTLENVLMTSEEEIKTTNPVATEEYGVVSSNLQSSTAGPQTQTVNSQGALPGMVWQNRDVYLQGPIWAKIPHTDGNFHPSPLMGGFGLKHPPPQILIKNTPVPANPPEVFTPAKFASFITQYSTGQVSVEIEWELQKENSKRWNPEIQYTSNYAKSNNVEFAVNNEGVYTEPRPIGTRYLTRNL

SEQ ID NO: 115 - protein, 685 aa, Adeno-associated virus
MAADGYLPDWLEDNLSEGIREWWDLKPGAPKPKANQQKQDDGRGLVLPGYKYLGPFNGLDKGEPVNEADAAALEHDKAYDKQLEQGDNPYLKYNHADAEFQERLQEDTSFGGNLGRAVFQAKKRVLEPLGLVEEGAKTAPGKKRPVEPSPQRSPDSSTGIGKTGQQPAKKRLNFGQTGDSESVPDPQPIGEPPAGPSGLGSGTMAAGGGAPMADNNEGADGVGSSSGNWHCDSTWLGDRVITTSTRTWALPTYNNHLYKQISNGTSGGSTNDNTYFGYSTPWGYFDFNRFHCHFSPRDWQRLINNNWGFRPKRLNFKLFNIQVKEVTQNEGTKTIANNLTSTIQVFTDSEYQLPYVLGSAHQGCLPPFPADVFMIPQYGYLTLNNGSQAVGRSSFYCLEYFPSQMLRTGNNFEFSYQFEDVPFHSSYAHSQSLDRLTNPLIDQYLYYLARTQSTTGSTRGLQFHQAGPNTMAEQSKNWLPGPCYRQQRLSKNIDSNNNSNFAWTGATKYHLNGRNSLTNPGVAMATNKDDEDQFFPINGVLVFGKTGAANKTTLENVLMTSEEEIKTTNPVATEEYGVVSSNLQSSTAGPQTQTVNSQGALPGMVWQNRDVYLQGPIWAKIPHTDGNFHPSPLMGGFGLKHPPPQILIKYTSNYYKSTNVDFAVNTEGTYSEPRPIGTRYLTRNL

SEQ ID NO: 116 - protein, 733 aa, Adeno-associated virus
MAADGYLPDWLEDNLSEGIREWWDLKPGAPKPKANQQKQDDGRGLVLPGYKYLGPFNGLDKGEPVNAADAAALEHDKAYDQQLKAGDNPYLRYNHADAEFQERLQEDTSFGGNLGRAVFQAKKRVLEPLGLVEEGAKTAPGKKRPIESPDSSTGIGKKGQQPAKKKLNFGQTGDSESVPDPQPIGEPPAGPSGLGSGTMAAGGGAPMADNNEGADGVGSSSGNWHCDSTWLGDRVITTSTRTWALPTYNNHLYKQISNGTSGGSTNDNTYFGYSTPWGYFDFNRFHCHFSPRDWQRLINNNWGFRPKRLNFKLFNIQVKEVTQNEGTKTIANNLTSTIQVFTDSEYQLPYVLGSAHQGCLPPFPADVFMIPQYGYLTLNNGSQAVGRSSFYCLEYFPSQMLRTGNNFEFSYQFEDVPFHSSYAHSQSLDRLMNPLIDQYLYYLSRTQSTGGTAGTQQLLFSQAGPNNMSAQAKNWLPGPCYRQQRVSTTVSQNNNSNFAWTGATKYHLNGRDSLVNPGVAMATHKGDEERFFPSSGVLMFGKQGAGKDNVDYSSVMLTSEEEIKTTNPVATEQYGVVADNLQQQNAAPIVGAVNSQGALPGMVWQNRDVYLQGPIWAKIPHTDGNFHPSPLMGGFGLKHPPPQILIKNTPVPADPPTTFSQAKLASFITQYSTGQVSVEIEWELQKENSKRWNPEIQYTSNYYKSTNVDFAVNTEGTYSEPRPIGTRYLTRSL

SEQ ID NO: 117 - protein, 729 aa, Adeno-associated virus
MAADGYLPDWLEDNLSEGIREWWDLKPGAPKPKANQQKQDDGRGLVLPGYKYLGPFNGLDKGEPVNAADAAALEHDKAYDQQLKAGDNPYLRYNHADAEFQERLQEDTSFGGNLGRAVFQAKKRVLEPLGLVEEGAKTAPGKKRPIDSPDSSTGIGKKGQQPAKKKLNFGQTGDSESVPDPQPLGEPPAAPSSVGSGTMAAGGGAPMADNNEGADGVGNASGNWHCDSTWLGDRVITTSTRTWALPTYNNHLYKQISSSSSGATNDNHYFGYSTPWGYFDFNRFHCHFSPRDWQRLINNNWGFRPKKLRFKLFNIQVKEVTTNDGVTTIANNLTSTVQVFSDSEYQLPYVLGSAHQGCLPPFPADVFMIPQYGYLTLNNGSQSVGRSSFYCLEYFPSQMLRTGNNFEFSYSFEDVPFHSSYAHSQSLDRLMNPLIDQYLYYLARTQSTTGSTRELQFHQAGPNTMAEQSKNWLPGPCYRQQGLSKNLDFNNNSNFAWTAATKYHLNGRNSLTNPGIPMATNKDDEDQFFPINGVLVFGKTGAANKTTLENVLMTSEEEIKTTNPVATEEYGVVSSNLQPSTAGPQSQTINSQGALPGMVWQNRDVYLQGPIWAKIPHTDGNFHPSPLMGGFGLKHPPPQILIKNTPVPANPPEVFTPAKFASFITQYSTGQVSVEIEWELQKENSKRWNPEIQYTSNYAKSNNVEFAVNPDGVYTEPRPIGTRYLPRNL

SEQ ID NO: 118 - protein, 736 aa, Adeno-associated virus
MAADGYLPDWLEDNLSEGIREWWDLKPGAPKPKANQQKQDDGRGLVLPGYKYLGPFNGLDKGEPVNAADAAALEHDKAYDQQLEAGDNPYLRYNHADAEFQERLQEDTSFGGNLGRAVFQAKKRVLEPLGLVEEGAKTAPGKKRPVEQSPQEPDSSSGIGKKGQQPARKRLNFGQTGDSESVPDPQPLGEPPAAPSGVGPNTMAAGGGAPMADNNEGADGVGSSSGNWHCDSTWLGDRVITTSTRTWALPTYNNHLYKQISNGTSGGATNDNTYFGYSTPWGYFDFNRFHCHFSPRDWQRLINNNWGFRPKRLSFKLFNIQVKEVTQNEGTKTIANNLTSTIQVFTDSEYQLPYVLGSAHQGCLPPFPADVFMIPQYGYLTLNNGSQAVGRSSFYCLEYFPSQMLRTGNNFQFTYTFEDVPFHSSYAHSQSLDRLMNPLIDQYLYYLSRTQTTGGTANTQTLGFSQGGPNTMANQAKNWLPGPCYRQQRVSTTTGQNNNSNFAWTAGTKYHLNGRNSLANPGIAMATHKDDEERFFPVTGSCFWQQNAARDNADYSDVMLTSEEEIKTTNPVATEEYGIVADNLQQQNTAPQIGTVNSQGALPGMVWQNRDVYLQGPIWAKIPHTDGNFHPSPLMGGFGLKHPPPQILIKNTPVPADPPTTFNQSKLNSFITQYSTGQVSVEIEWELQKENSKRWNPEIQYTSNYYKSTSVDFAVNTEGVYSEPRPIGTRYLTRNL

SEQ ID NO: 119 - protein, 737 aa, Adeno-associated virus
MAADGYLPDWLEDNLSEGIREWWDLKPGAPKPKANQQKQDDGRGLVLPGYKYLGPFNGLDKGEPVNAADAAALEHDKAYDQQLKAGDNPYLRYNHADAEFQERLQEDTSFGGNLGRAVFQAKKRVLEPLGLVEEAAKTAPGKKRPVEPSPQRSPDSSTGIGKKGQQPARKRLNFGQTGDSESVPDPQPIGEPPAGPSGLGSGTMAAGGGAPMADNNKGADGVGNASGNWHCDSTWLGDRVITTSTRTWALPTYNNHLYKQISSQSAGSTNDNVYFGYSTPWGYFDFNRFHCHFSPRDWQRLINSNWGFRPKKLNFKLFNIQVKEVTTNDGVTTIANNLTSTVQVFSDSEYQLPYVLGSAHQGCLPPFPADVFMIPQYGYLTLNNGSQSVGRSSFYCLEYFPSQMLRTGNNFTFSYTFEDVPFHSSYAHSQSLDRLMNPLIDQYLYYLARTQSNAGGTAGNRELQFYQGGPTTMAEQAKNWLPGPCFRQQRVSKTLDQNNNSNFAWTGATKYHLNGRNSLVNPGVAMATHKDDEERFFPSSGVLIFGKTGAANKTTLENVLMTNEEEIRPTNPVATEEYGTVSSNLQAANTAAQTQVVNNQGALPGMVWQNRDVYLQGPIWAKIPHTDGNFHPSPLMGGFGLKHPPPQILIKNTPVPANPPEVFTPAKFASFITQYSTGQVSVEIEWELQKENSKRWNPEIQYTSNFDKQTGVDFAVDSQGVYSEPRPIGTRYLTRNL

SEQ ID NO: 120 - protein, 738 aa, Adeno-associated virus
MAADGYLPDWLEDNLSEGIREWWDLKPGAPKPKANQQKQDDGRGLVLPGYKYLGPFNGLDKGEPVNAADAAALEHDKAYDQQLKAGDNPHLRYNHADAEFQERLQEDTSFGGNLGRAVFQAKKRVLEPLGLVEEGAKTAPGKKRPVEPSPQRSPDSSTGIGKKGQQPARKRLNFGQTGDSESVPDPQLIGEPPAAPSSVGSGTMAAGGGAPMADNNEGADGVGSSSGNWHCDSTWLGDRVITTSTRTWALPTYNNHLYKQISNGTSGGSTNDNTYFGYSTPWGYFDFNRFHCHFSPRDWQRLINNNWGFRPKRLSFKLFNIQVKEVTQNEGTKTIANNLTSTIQVFTDSEYQLPYVLGSAHQGCLPPFPADVFMIPQYGNLTLNNGSQAVGRSSFYCLEYFPSQMLRTGNNFSFSYTFEDVPFHSSYAHSQSLDRLMNPLIDQYLYYLSRTQSTGGTAGTQQLLFSQAGPSNMSAQARNWLPGPCYRQQRVSTTLSQNNNSNFAWTGATKYHLNGRDSLVNPGVAMATNKDDEDRFFPSSGILMFGKQGAGKDNMGYSNVMLTSEEEIKTTNPVATEQYGVVADNLQQQNTAPIVGAVNSQGALPGMVWQNRDVYLQGPIWAKIPHTDGNFHPSPLMGGFGLKHPPPQILIKNTPVPADPPTAFNQAKLNSFITQYGTGQVSVEIEWELQKENSKRWNPEIQYTSNYYKSTNVDFAVNTEGVYSEPRPIGTRYLTRNL

SEQ ID NO: 121 - protein, 738 aa, Adeno-associated virus
MAADGYLPDWLEDNLSEGIREWWDLKPGAPKPKANQQKQDDGRGLVLPGYKYLGPFNGLDKGEPVNAADAAALEHDKAYDQQLKAGDNPYLRYNHADAEFQERLQEDTSFGGNLGRAVFQAKKRVLEPLGLVEEGAKTAPGKKRPVEPSPQRSPDSSTGIGKKGQQPAGKRLNFGQTGDSESVPDPQPIGEPPAAPSSVGSGTMAAGGGAPMADNNEGADGVGSSSGNWHCDSTWLGDRVITTSTRTWALPTYNNHLYKQISNGTSGGSTNDNTYFGYSTPWGYFDFNRFHCHFSPRDWQRLINNNWGFRPKRLSFKLFNIQVKEVTQNEGTKTIANNLTSTIQVFTDSEYQLPYVLGSAHQGCLPPFPADVFMIPQYGYLTLNNGSQAVGRSSFYCLEYFPSQMLRTGNNFSFSYTFEDVPFHSSYAHSQSLDRLMNPLVDQYLYYLSRTQSTGGTAGTQQLLFSQAGPSNMSAQARNWLPGPCYRQQRVSTTLSQNNNSNFAWTGATKYHLNGRDSLVNPGVAMATNKDDEDRFFPSSGILMFGKQGAGKDNVDYSNVMLTSEEEIKTTNPVATEQYGVVADNLQQQNTAPIVGAVNSQGALPGMVWQNRDVYLQGPIWAKIPHTDGNFHPSPLMGGFGLKHPPPQILIKNTPVPADPPTAFNQAKLNSFITQYSTGQVSVEIEWELQKENSKRWSPEIQYTSNYYKSTNVDFAVNTEGVYSEPRPIGTRYLTRNL

SEQ ID NO: 122 - protein, 738 aa, Adeno-associated virus
MVADGYLPDWLEDNLSEGIREWWDLKPGAPKPKANQQKQGDGRGLVLPGYKYLGPFNGLDKGEPVNAADAAALEHDKAYDQQLKAGDNPYLRYNHADAELQERLQEDTSFGGNLGRAVFQAKKRVLEPLGLVEEGAKTAPGKKRPVEPSPQRSPDSSTGIGKKGQQPARKRLNFGQTGDSESVPDPQPIGEPPAAPSSVGSGTMAAGGGAPMADNNEGADGVGSSSGNWHCDSTWLGDRVITTSTRTWALPTYNNHLYKQISNGTSGGSTNDNTYFGYSTPWGYFDFNRFHCHFSPRDWQRLINNNWGFRPKRLSFKLFNIQVKEVTQNEGTKTIANNLTSTIQVFTDSEYQLPYVLGSAHQGCQPPFPADVFMIPQYGYLTLNNGSQAVGRSSFYCLEYFPSQMLRTGNNFSFSYTFEDVPFHSSYAHSQSLDRLMNPLIDQYLYYLSRTQSTGGTAGTQQLLFSQAGPSNMSAQARNWLPGPCYRQQRVSTTLSQNNNSNFAWTGATKYHLNGRDSLVNPGVAMATNKDDEDRFFPSSGILMFGKQGAGKDNVDYSNVMLTSEEEIKTTNPVATEQYGVVADNLQQQNTAPIVGAVNSQGALPGMVWQNRDVYLQGPIWAKIPHTDGNFHPSPLMGGFGLKHPPPQILIKNTPVPADPPTAFNQAKLNSFITQYSTGQVSVEIEWEPQKENSKRWNPEIQYTSNYYKSTNVDFAVNTEGVYSEPRPIGTRYLTRNL

SEQ ID NO: 123 - protein, 738 aa, Adeno-associated virus
MAADGYLPDWLEDNLSEGIREWWDLKPGAPKPKANQQKQDDGRGLVLPGYKYLGPFNGLDKGEPVNAADAAALEHDKAYDQQLKAGDNPYLRYNHADAEFQERLQEDTSFGGNLGRAVFQAKKRVLEPLGLVEEGAKTAPGKKRPVEPSPQRSPDSSTGIGKKGQQPARKRLNFGQTGDSESVPDPQPIGEPPAAPSSVGSGTMAAGGGAPMADNNEGADGVGSSSGNWHCDSTWLGDRVITTSTRTWALPTYNNHLYKQISNGTSGGSTNDNTYFGYSTPWGYFDFNRFHCHFSPRDWQRLINNNWGFRPKRLSFKLFNIQVKEVTQNEGTKTIANSLTSTIQVFTDSEYQLPYVLGSAHQGCLPPFPADVFMIPQYGYLTPNNGSQAVGRSSFYCLEYFPSQMLRTGNNFSFSYTFEDVPFHSSYAHSQSLDRLMNPLIDQYLYYLSRTQSTGGTAGTQQLLSSQAGPSNMSAQARNWLPGPCYRQQRVSTTLSQNNNSNFAWTGATKYHLNGRDSLVNPGVAMATNKDDEDRFFPSSGILMFGKQGAGKDNVDYSNVMLTSEEEIKTTNPVATEQYGVVADNLQQQNTAPIVGAVNSQGALPGMVWQNRDVYLQGPIWAKIPHTDGNFHPSPLMGGFGLKHPPPQILIKNTPVPADPPTAFNQAKLNSFITQYSTGQVSVEIEWELQKENSKRWNPEIQYTSNYYKSTNVDFAVNTEGVYSEPRPIGTRYLTRNL

SEQ ID NO: 124 - protein, 738 aa, Adeno-associated virus
MAADGYLPDWLEDNLSEGIREWWDLKPGAPKPKANQQKQDDGRGLVLPGYKYLGPFNGLDKGEPVNAADAAALEHDKAYDQQLKAGDNPYLRYNHADAEFQERLQEDTSFGGNLGRAVFQAKKRVLEPLGLVEEGAKTAPGKKRPVEPSPQRSPDSSTGIGKKGQQPARKRLNFGQTGDSESVPDPQPIGEPPAAPSSVGSGTMAAGGGAPMADNNEGADGVGSSSGNWHCDSTWLGDRVITTSTRTWALPTYNNHLYKQISNGTSGGSTNDNTYFGYSTPWGYFDFNRFHCHFSPRDWQRLINNNWGFRPKRLSFKLFNIQVKEVTQNEGTKTIANNLTSTIQVFTDSEYQLPYVLGSAHQGCLPPFPADVFMIPQYGYLTLNNGSQAVGRSSFYCLEYFPSQMLRTGNNFSFSYTFEDVPFHSSYVHSQSLDRLMNPLIDQYLYYLSRTQSTGGTAGTQQLLFSQAGPSNMSAQARNWLPGPCYRQQRVSTTLSQNNNSNFAWTGATKYHLNGRDSLVNSGVAMATNKDDEDRFFPSSGILMFGKQGAGKDNVDYSNVMLTSEEEIKTTNPVATEQYGVVADNLQQQNTAPIVGAVNSQGALPGMVWQNRDVYLQGPIWAKIPHTDGNFHPSPLMGGFGLKHPPPQILIKNTPVPADPPTAFNQAKLNSFITQYSTGQVSVEIEWELQKENSKRWNPEIQYTSNYYKSTNVDFAVNTEGVYSEPRPIGTRYPTRNL

SEQ ID NO: 125 - protein, 737 aa, Adeno-associated virus
MAADGYLPDWLEDNLSEGIREWWDLKPGAPKPKANQQKQDDGRGLVLPGYKYLGPFNGLDKGEPVNAADAAALEHDKAYDQQLKAGDNPYLRYNHADAEFQERLQEDTSFGGNLGRAVFQAKKRVLEPLGLVEEAAKTAPGKKRPVEPSPQRSPDSSTGIGKKGQQPARKRLNFGQTGDSESVPDPQPLGEPPAGPSGLGSGTMAAGGGAPMADNNEGADGVGNASGNWHCDSTWLGDRVITTSTRTWALPTYNNHLYKQISSQSAGSTNDNVYFGYSTPWGYFDFNRFHCHFSPRDWQRLINNNWGFRPKKLNFKLFNIQVKEVTTNDGVTTIANNLTSTVQVFSDSEYQLPYVLGSAHQGCLPPFPADVFMIPQYGYLTLNNGSQSVGRSSFYCLEYFPSQVLRTGNNFTFSYTFEDVPFHSSYAHSQSLDRLMNPLIDQYLYYLARTQSNPGGTSGNRELQFYQGGPSTMAEQAKNWLPGPCFRQQRVSKTLDQNNNSNFAWTGATKYHLNGRNSLVNPGVAMATHKDDEDRFFPSSGVLIFGKTGATNKTTLENVLMTNEEEIRPTNPVATEEYGIVSSNLQAANTAAQTQVVNNQGALPGMVWQNRDVYLQGPIWAKIPHTDGNFHPSPLMGGFGLKHPPPQILIKNTPVPANPPEVFTPAKFASFITQYSTGQVSVEIEWELQKENSKRWNPEIQYTSNFDKQTGVDFAVDSQGVYSEPRPIGTRYLTRNL

SEQ ID NO: 126 - protein, 737 aa, Adeno-associated virus
MAADGYLPDWLEDNLSEGIREWWDLKPGAPKPKANQQKQDDGRGLVLPGYKYLGPFNGLDKGEPVNAADAAALEHDKAYDQQLKAGDNPYLRYNHADAEFQERLQEDTSFGGNLGRAVFQAKKRVLEPLGLVEEGAKTAPGKKRPVEPSPQRSPDSSTGIGKKGQQPARKRLNFGQTGDSESVPDPQPIGEPPAAPSSVGSGTMAAGGGAPMADNNEGADGVGSSSGNWHCDSTRLGDRVITTSTRTWALPTYNNHLYKQISSQSAGSTNDNVYFGYSTPWGYFDFNRFHCHFSPRDWQRLINNNWGFRPKKLNFKLFNIQVKEVTTNDGVTTIANNLTSTVQVFSDSEYQLPYVLGSAHQGCLPPFPADVFMIPQYGYLTLNNGSQSVGRSSFYCLEYFPSQMLRTGNNFTFSYTFEDVPFHSSYAHSQSLDRLMNPLIDQYLYYLARTQSNAGGTAGNRELQFYQGGPTTMAEQAKNWLPGPCFRQRRVSKTLDQNNNSNFAWTGATKYHLNGRNSLVNPGVAMATHKDDEERFFPSSGVLIFGKTGAANKTTLENVLMTNEEEIRPTNPVATEEYGTVSSNLQAANTAAQTQVVNNQGALPGMVWQNRDVYLQGPIWAKIPHTDGNFHPSPLMGGFGLKHPPPQILIKNTPVPANPPEVFTPAKFASFITQYSTGQVSVEIEWELQKENSKRWNPEIQYTSNFDKQTGVDFAVDSQGVYSEPRPIGTRYLTRNL

SEQ ID NO: 127 - protein, 738 aa, Adeno-associated virus
MAADGYLPDWLEDNLSEGIREWWALKPGAPKPKANQQKQDDGRGLVLPGYKYLGPFNGLDKGEPVNAADAAALEHDKAYDQQLQAGDNPYLRYNHADAEFQERLQEDTSFGGNLGRAVFQAKKRVLEPLGLVEEGAKTAPGKKRPVEPSPQRSPDSSTGIGKKGQQPARKRLNFGQTGDSESVPDPQPIGEPPAAPSSVGSGTMAAGGGAPMADNNEGADGVGSSSGNWHCDSTWLGDRVITTSTRTWALPTYNNHLYKQTSNGTSGGSTNDNTYFGYSTPWGYFDFNRFHCHFSPRDWQRLINNNWGFRPKRLSFKLFNIQVKEVTQNEGTKTIANNLTSTIQVFTDSEYQLPYVLGSAHQGCLPPFPADVFMIPQYGYLTLNNGSQAVGRSSFYCLEYFPSQMLRTGNNFSFSYTFEDVPFHSSYAHSQSLDRLMNPLIDQYLYYLSRTQSTGGTAGTQQLLFSQAGPSNMSAQARNWLPGPCYRQQRVSTTLSQNNNSNFAWTGATKYHLNGRDSLVNPGVAMATNKDDEDRFFPSSGILMFGKQGAGKDNVDYSNVMLTSEEEIKTTNPVATEQYGVVADNLQQQNTAPIVGAVNSQGALPGMVWQNRDVYLQGPIWAKIPHTDGNFHPSPLMGGFGLKHPPPQILIKNTPVPADPPTAFNQAKLNSFITQYSTGQVSAEIEWELQKENSKRWNPEIQYTSNYYKSTNVDFAVNTEGVYSEPRPIGTRYLTRNL

SEQ ID NO: 128 - protein, 738 aa, Adeno-associated virus
MAADGYLPDWLEDNLSEGIREWWDLKPGAPKPKANQQKQDDGRGLVLPGYKYLGPFNGLDKGEPVNAADAAALEHDKAYDQQLKAGDNPYLRYNHADAEFQERLQEDTSFGGNLGRAVFQAKKRVLEPLGLVEEAAKTAPGKKRPVEPSPQRSPDSSTGIGKKGQQPARKRLNFGQTGDSESVPDPQPIGEPPAAPSSVGSGTMAAGGGAPMADNNEGADGVGSSSGNWHCDSTWLGDRVITTSTRTWALPTYNNHLYKQISNGTSGGSTNDNTYFGYSTPWGYFDFNRFHCHFSPRDWQRLINNNWGFRPKRLSFKLFNIQVKEVTQNEGTKTIANNLTSTIQVFTDSEYQLPYVLGSAHQGCLPPFPADVFMIPQYGYLTLNNGSQAVGRSSFYCLEYFPSQMLRTGNNFSFSYTFEDVPFHSSYAHSQSLDRLMNPLIDQYLYYLSRTQSTGGTAGTQQLLFSQAGPSNMSAQARNWLPGPCYRQQRVSTTLSQNNNSNFAWTGATKYHLNGRDSLVNPGVAMATNKDDEDRFFPSSGILMFGKQGAGKDNVDYSNVMLTSEEEIKTTNPVATEQYGVVADNLQQQNTAPIVGAVNSQGALPGMVWQNRDVYLQGPIWAKIPHTDGNFHPSPLMGGFGLKHPPPQILIKSTPVPADPPTAFNQAKLNSFITQYSTGQVSVEIEWELQKENSKCWNPEIQYTSNYYKSTNVDFAVNTEGVYSEPRPIGTRYLTRNL

SEQ ID NO: 129 - protein, 737 aa, Adeno-associated virus
MAADGYLPDWLEDNLSEGIREWWDLKPGAPKPKANQQKQDDGRGLVLPGYKYLGPFNGLDKGEPVNAADAAALEHDKAYDQQLKAGDNPYLRYNHADAEFQERLQEDTSFGGNLGRAVFQAKKRVLEPLGLAEEAAKTAPGKKRPVEPSPQRSPDSSTGIGKKGQQPARKRLNFGQTGDSESVPDPQPIGEPPAGPSGLGSGTMAAGGGAPMADNNKGADGVGNASGNWHCDSTWLGDRVITTSTRTWALPTYNNHLYKQISSQSAGSTNDNVYFGYSTPWGYFDFNRFHCHFSPRDWQRLINNNWGFRPKKLNFKLFNIQVKEVTTGDGVTTIANNLTSTVQVFSDSEYQLPYVLGSAHQGCLPPFPADVFMIPQYGYLTLNNDSQSVGRSSFYCLEYFPSQMLRTGNNFTFSYTFEDVPFHSSYAHSQSLDRLMNPLIDQYLYYLARTQSNAGGTAGNRELQFYQGGPTTMAEQAKNWLPGPCFRQQRVSKTLDQNNNSNFAWTGATKYHLNGRNSLVNPGVAMATHKDDEERFFPSSGVLIFGKTGAANKTTLENVLMTNEEEIRPTNPVATEEYGTVSSNLQAANTAAQTQVVNNQGALPGMVWQNRDVYLQGPIWAKIPHTDGNFHPSPLMGGFGLKHPPPQILIKNTPVPANPPEVFTPAKFASFITQYSTGQVSVEIEWELQKENSKRWNPEIQYTSNFDKQTGVDFAVDSQGVYSEPRPIGTRYLTRNL

SEQ ID NO: 130 - protein, 738 aa, Adeno-associated virus
MAADGYLPDWLEDNLSEGIREWWDLKPGAPKPKANQQKQDDGRGLVLPGYKYLGPFNGLDKGEPVNAADAAALEHDKAYDQQLKAGDNPYLRYNHADAEFQERLQEDTSFGGNLGRAVFQAKKRVLEPLGLVEEGAKTAPGKKRPVEPSPQRSPDSSTGIGKKGQQPARKRLNFGQTGDSESVPDPQPIGEPPAAPSSVGSGTMAAGGGAPMADNNEGADGVGSSSGNWHCDSTWLGDRVITTSTRTWALPTYNNHLYKQISNGTSGGSTNDNTYFGYSTPWGYFDFNRFHCHFSPRDWQRLINNNWGFRPKRLSFKLFNIQVKEVTQNEGTKTIANNLTSTIQVFTDSEYQLPYVLGSAHQGCLPPFPADVFMIPQYGYLTLNNGSQAVGRSSFYCLEYFPSQMLRTGNNFSFSYTFEDVPFHSSYAHSQSLDRLMNPLIDQYLYYLSRTQSTGGTAGTQQLLFSQAGPSNMSAQARNWLPGPCYRQQRVSTTLSQNNNSNFAWTGATKYHLNGRDSLVNPGVAMATNKDDEDRFFPSSGILMFGKQGAGKDNVDYSNVMLTSEEEIKTTNPVATEQYGVVADNLQQQNTAPIVGAVNSQGALPGMVWQNRDVYLQGPIWAKIPHTDGNFHPSPLMGGFGLKHPPPQILIKNTPVPADPPTAFNQAKLNSFITQYSTGQVSVEIVWELQKENSKRRNPEIQYTSNYYKSTNVDFAVNTEGVYSEPRPIGTRYLTRNL

SEQ ID NO: 131 - protein, 735 aa, Adeno-associated virus
MAADGYLPDWLEDTLSEGIRQWWKLKPGPPPPKPAERHKDDSRGLVLPGYKYLGPFNGLDKGEPVNEADAAALEHDKAYDRQLDSGDNPYLKYNHADAEFQERLKEDTSFGGNLGRAVFQAKKRVLEPLGLVEEPVKTAPGKKRPVEHSPAEPDSSSGTGKAGQQPARKRLNFGQTGDADSVPDPQPLGQPPAAPSGLGSTTMATGSGAPMADNNEGADGVGNSSGNWHCDSQWLGDRVITTSTRTWAQPTYNNHLYKQISSQSGASNDNHYFGYSTPWGYFDFNRFHCHFSPRDWQRLINNNWGFRPKRLNFKLFNIQVKEVTQNDGTTTIANNLTSTVQVFTDSEYQLPYVLGSAHQGCLPPFPADVFMVPQYGYLTLNNGSQAVGRSSFYCLEYFPSQMLRTGNNFQFSYTFEDVPFHSSYAHSQSLDRLMNPLIDQYLYYLNKTQSNSGALQQSRLLFSQAGPTSMSLQAKNWLPGPCYRQQRLSKQANDNNNSNFPWTAATKYHLNGRDSLVNPGPAMASHKDDEEKFFPMHGTLIFGKQGTNANDADLDNVMITDEEEIRTTNPVATEQYGYVSNNLQNSNTGPTTGTVNHRGALPGMVWQDRDVYLQGPIWAKIPHTDGHFHPSPLMGGFGLKHPPPQIMIKNTPVPANPPTNFSSAKFASFITQYSTGQVSVEIEWELQKENSKRWNPEIQYTSNYNKSVNVDFTVDTNGVYSEPRPIGTRYLTRNL

SEQ ID NO: 132 - protein, 736 aa, Adeno-associated virus
  MOD_RES (168)..(168): Lys or Arg
  MOD_RES (205)..(205): Ala or Ser
  MOD_RES (266)..(266): Ala or Gly
  MOD_RES (311)..(311): Arg or Lys
  MOD_RES (411)..(411): Glu or Gln
  MOD_RES (460)..(460): Thr or Glu
  MOD_RES (493)..(493): Ala or Thr
  MOD_RES (562)..(562): Ser or Asn
  MOD_RES (576)..(576): Gln or Glu
  MOD_RES (587)..(587): Ser or Ala
  MOD_RES (609)..(609): Asn or Asp
MAADGYLPDWLEDNLSEGIREWWDLKPGAPKPKANQQKQDDGRGLVLPGYKYLGPFNGLDKGEPVNAADAAALEHDKAYDQQLKAGDNPYLRYNHADAEFQERLQEDTSFGGNLGRAVFQAKKRVLEPLGLVEEGAKTAPGKKRPVEQSPQEPDSSSGIGKKGQQPAXKRLNFGQTGDSESVPDPQPLGEPPAAPSGVGSNTMAXGGGAPMADNNEGADGVGNASGNWHCDSTWLGDRVITTSTRTWALPTYNNHLYKQISSQSGXSTNDNTYFGYSTPWGYFDFNRFHCHFSPRDWQRLINNNWGFRPKXLNFKLFNIQVKEVTTNDGTTTIANNLTSTVQVFTDSEYQLPYVLGSAHQGCLPPFPADVFMIPQYGYLTLNNGSQAVGRSSFYCLEYFPSQMLRTGNNFXFSYTFEDVPFHSSYAHSQSLDRLMNPLIDQYLYYLSRTQTTSGTAGNRXLQFSQAGPSSMANQAKNWLPGPCYRQQRVSKTXNQNNNSNFAWTGATKYHLNGRDSLVNPGPAMATHKDDEDKFFPMSGVLIFGKQGAGNSNVDLDNVMITXEEEIKTTNPVATEXYGTVATNLQSXNTAPATGTVNSQGALPGMVWQXRDVYLQGPIWAKIPHTDGHFHPSPLMGGFGLKHPPPQILIKNTPVPANPPTTFSPAKFASFITQYSTGQVSVEIEWELQKENSKRWNPEIQYTSNYNKSTNVDFAVDTNGVYSEPRPIGTRYLTRNL

SEQ ID NO: 133 - protein, 737 aa, Adeno-associated virus
  MOD_RES (157)..(157): Thr or Ser
  MOD_RES (168)..(168): Lys or Arg
  MOD_RES (262)..(262): Asn or Ser
  MOD_RES (263)..(263): Ser or His
  MOD_RES (312)..(312): Arg or Lys
  MOD_RES (412)..(412): Glu or Gln
  MOD_RES (460)..(460): Arg or Gln
  MOD_RES (461)..(461): Thr or Glu
  MOD_RES (552)..(552): Asp or Ser
  MOD_RES (556)..(556): Leu or Tyr
  MOD_RES (557)..(557): Asp or Ser
  MOD_RES (563)..(563): Ser or Asn
  MOD_RES (580)..(580): Val or Ile
  MOD_RES (588)..(588): Asn or Ser
  MOD_RES (664)..(664): Ser or Thr
MAADGYLPDWLEDNLSEGIREWWDLKPGAPKPKANQQKQDDGRGLVLPGYKYLGPFNGLDKGEPVNAADAAALEHDKAYDQQLKAGDNPYLRYNHADAEFQERLQEDTSFGGNLGRAVFQAKKRVLEPLGLVEEGAKTAPGKKRPVEQSPQEPDSSXGIGKKGQQPAXKRLNFGQTGDSESVPDPQPLGEPPAAPSGVGSNTMAAGGGAPMADNNEGADGVGNASGNWHCDSTWLGDRVITTSTRTWALPTYNNHLYKQISXXQSGGSTNDNTYFGYSTPWGYFDFNRFHCHFSPRDWQRLINNNWGFRPKXLNFKLFNIQVKEVTTNDGTTTIANNLTSTVQVFTDSEYQLPYVLGSAHQGCLPPFPADVFMIPQYGYLTLNNGSQAVGRSSFYCLEYFPSQMLRTGNNFXFSYTFEDVPFHSSYAHSQSLDRLMNPLIDQYLYYLSRTQTTGGTAGNXXLQFSQAGPSSMANQAKNWLPGPCYRQQRVSKTTNQNNNSNFAWTGATKYHLNGRDSLVNPGVAMATHKDDEDRFFPSSGVLIFGKQGAGNXNVDXXNVMITXEEEIKTTNPVATEEYGXVATNLQSXNTAPQTGTVNSQGALPGMVWQNRDVYLQGPIWAKIPHTDGNFHPSPLMGGFGLKHPPPQILIKNTPVPANPPTTFXPAKFASFITQYSTGQVSVEIEWELQKENSKRWNPEIQYTSNYNKSTNVDFAVDTEGVYSEPRPIGTRYLTRNL

SEQ ID NO: 134 - protein, 738 aa, Adeno-associated virus
  MOD_RES (158)..(158): Thr or Ser
  MOD_RES (169)..(169): Lys or Arg
  MOD_RES (564)..(564): Ser or Asn
MAADGYLPDWLEDNLSEGIREWWDLKPGAPKPKANQQKQDDGRGLVLPGYKYLGPFNGLDKGEPVNAADAAALEHDKAYDQQLKAGDNPYLRYNHADAEFQERLQEDTSFGGNLGRAVFQAKKRVLEPLGLVEEGAKTAPGKKRPVEQSPQREPDSSXGIGKKGQQPAXKRLNFGQTGDSESVPDPQPLGEPPAAPSGVGSNTMAAGGGAPMADNNEGADGVGNSSGNWHCDSTWLGDRVITTSTRTWALPTYNNHLYKQISNGTSGGSTNDNTYFGYSTPWGYFDFNRFHCHFSPRDWQRLINNNWGFRPKRLNFKLFNIQVKEVTTNEGTKTIANNLTSTVQVFTDSEYQLPYVLGSAHQGCLPPFPADVFMIPQYGYLTLNNGSQAVGRSSFYCLEYFPSQMLRTGNNFQFSYTFEDVPFHSSYAHSQSLDRLMNPLIDQYLYYLSRTQTTGGTAGTQTLQFSQAGPSSMANQAKNWLPGPCYRQQRVSTTTNQNNNSNFAWTGATKYHLNGRDSLVNPGVAMATHKDDEDRFFPSSGVLIFGKQGAGNDNVDYSNVMITXEEEIKTTNPVATEEYGVVATNLQSANTAPQTGTVNSQGALPGMVWQNRDVYLQGPIWAKIPHTDGNFHPSPLMGGFGLKHPPPQILIKNTPVPADPPTTFNQAKLNSFITQYSTGQVSVEIEWELQKENSKRWNPEIQYTSNYYKSTNVDFAVNTEGVYSEPRPIGTRYLTRNL

SEQ ID NO: 135 - protein, 738 aa, Adeno-associated virus
  MOD_RES (158)..(158): Thr or Ser
  MOD_RES (169)..(169): Arg or Lys
  MOD_RES (315)..(315): Asn or Ser
  MOD_RES (413)..(413): Gln or Glu
  MOD_RES (472)..(472): Asn, Thr or Ser
  MOD_RES (534)..(534): Asp or Glu
  MOD_RES (542)..(542): Ile or Val
  MOD_RES (595)..(595): Ile or Val
MAADGYLPDWLEDNLSEGIREWWDLKPGAPKPKANQQKQDDGRGLVLPGYKYLGPFNGLDKGEPVNAADAAALEHDKAYDQQLKAGDNPYLRYNHADAEFQERLQEDTSFGGNLGRAVFQAKKRVLEPLGLVEEGAKTAPGKKRPVEQSPQREPDSSXGIGKKGQQPAXKRLNFGQTGDSESVPDPQPLGEPPAAPSGVGSNTMAAGGGAPMADNNEGADGVGSSSGNWHCDSTWLGDRVITTSTRTWALPTYNNHLYKQISNGTSGGSTNDNTYFGYSTPWGYFDFNRFHCHFSPRDWQRLINNNWGFRPKRLXFKLFNIQVKEVTQNEGTKTIANNLTSTIQVFTDSEYQLPYVLGSAHQGCLPPFPADVFMIPQYGYLTLNNGSQAVGRSSFYCLEYFPSQMLRTGNNFXFSYTFEDVPFHSSYAHSQSLDRLMNPLIDQYLYYLSRTQTTGGTAGTQTLQFSQAGPSXMANQAKNWLPGPCYRQQRVSTTTSQNNNSNFAWTGATKYHLNGRDSLVNPGVAMATHKDDEXRFFPSSGXLIFGKQGAGKDNVDYSNVMLTSEEEIKTTNPVATEEYGVVADNLQQQNTAPQXGTVNSQGALPGMVWQNRDVYLQGPIWAKIPHTDGNFHPSPLMGGFGLKHPPPQILIKNTPVPADPPTTFNQAKLNSFITQYSTGQVSVEIEWELQKENSKRWNPEIQYTSNYYKSTNVDFAVNTEGVYSEPRPIGTRYLTRNL

SEQ ID NO: 136 - protein, 738 aa, Adeno-associated virus
  MOD_RES (169)..(169): Arg or Lys
  MOD_RES (315)..(315): Asn or Ser
  MOD_RES (534)..(534): Asp or Glu
  MOD_RES (542)..(542): Ile or Val
MAADGYLPDWLEDNLSEGIREWWDLKPGAPKPKANQQKQDDGRGLVLPGYKYLGPFNGLDKGEPVNAADAAALEHDKAYDQQLKAGDNPYLRYNHADAEFQERLQEDTSFGGNLGRAVFQAKKRVLEPLGLVEEGAKTAPGKKRPVEPSPQRSPDSSTGIGKKGQQPAXKRLNFGQTGDSESVPDPQPIGEPPAAPSGVGSGTMAAGGGAPMADNNEGADGVGSSSGNWHCDSTWLGDRVITTSTRTWALPTYNNHLYKQISNGTSGGSTNDNTYFGYSTPWGYFDFNRFHCHFSPRDWQRLINNNWGFRPKRLXFKLFNIQVKEVTQNEGTKTIANNLTSTIQVFTDSEYQLPYVLGSAHQGCLPPFPADVFMIPQYGYLTLNNGSQAVGRSSFYCLEYFPSQMLRTGNNFEFSYTFEDVPFHSSYAHSQSLDRLMNPLIDQYLYYLSRTQSTGGTAGTQQLLFSQAGPSNMSAQAKNWLPGPCYRQQRVSTTLSQNNNSNFAWTGATKYHLNGRDSLVNPGVAMATHKDDEXRFFPSSGXLMFGKQGAGKDNVDYSNVMLTSEEEIKTTNPVATEQYGVVADNLQQQNTAPIVGAVNSQGALPGMVWQNRDVYLQGPIWAKIPHTDGNFHPSPLMGGFGLKHPPPQILIKNTPVPADPPTTFNQAKLNSFITQYSTGQVSVEIEWELQKENSKRWNPEIQYTSNYYKSTNVDFAVNTEGVYSEPRPIGTRYLTRNL

SEQ ID NO: 137 - protein, 738 aa, Adeno-associated virus
  MOD_RES (471)..(471): Ser or Asn
MAADGYLPDWLEDNLSEGIREWWDLKPGAPKPKANQQKQDDGRGLVLPGYKYLGPFNGLDKGEPVNAADAAALEHDKAYDQQLKAGDNPYLRYNHADAEFQERLQEDTSFGGNLGRAVFQAKKRVLEPLGLVEEGAKTAPGKKRPVEPSPQRSPDSSTGIGKKGQQPAKKRLNFGQTGDSESVPDPQPIGEPPAGPSGLGSGTMAAGGGAPMADNNEGADGVGSSSGNWHCDSTWLGDRVITTSTRTWALPTYNNHLYKQISNGTSGGSTNDNTYFGYSTPWGYFDFNRFHCHFSPRDWQRLINNNWGFRPKRLNFKLFNIQVKEVTQNEGTKTIANNLTSTIQVFTDSEYQLPYVLGSAHQGCLPPFPADVFMIPQYGYLTLNNGSQAVGRSSFYCLEYFPSQMLRTGNNFEFSYTFEDVPFHSSYAHSQSLDRLMNPLIDQYLYYLSRTQSTGGTAGTQQLLFSQAGPXNMSAQAKNWLPGPCYRQQRVSTTLSQNNNSNFAWTGATKYHLNGRDSLVNPGVAMATHKDDEERFFPSSGVLMFGKQGAGKDNVDYSSVMLTSEEEIKTTNPVATEQYGVVADNLQQQNTAPIVGAVNSQGALPGMVWQNRDVYLQGPIWAKIPHTDGNFHPSPLMGGFGLKHPPPQILIKNTPVPADPPTTFSQAKLASFITQYSTGQVSVEIEWELQKENSKRWNPEIQYTSNYYKSTNVDFAVNTEGTYSEPRPIGTRYLTRNL

SEQ ID NO: 138 - protein, 738 aa, Adeno-associated virus
  MOD_RES (157)..(157): Ser or Thr
  MOD_RES (169)..(169): Lys or Arg
  MOD_RES (457)..(457): Ala or Gly
  MOD_RES (463)..(463): Gln or Ala
  MOD_RES (508)..(508): Thr or Ala
  MOD_RES (510)..(510): Tyr or Phe
  MOD_RES (511)..(511): His or Lys
  MOD_RES (558)..(558): Gln or Asn
  MOD_RES (585)..(585): Asn or His
  MOD_RES (587)..(587): Ser or Ala
MAADGYLPDWLEDNLSEGIREWWDLKPGAPKPKANQQKQDDGRGLVLPGYKYLGPFNGLDKGEPVNAADAAALEHDKAYDQQLKAGDNPYLRYNHADAEFQERLQEDTSFGGNLGRAVFQAKKRVLEPLGLVEEGAKTAPGKKRPVEQSPQEPDSSXLGIGKTGQQPAXKRLNFGQTGDSESVPDPQPLGEPPAAPSGVGSNTMASGGGAPMADNNEGADGVGNSSGNWHCDSTWLGDRVITTSTRTWALPTYNNHLYKQISNGTSGGSTNDNTYFGYSTPWGYFDFNRFHCHFSPRDWQRLINNNWGFRPKRLNFKLFNIQVKEVTTNEGTKTIANNLTSTVQVFTDSEYQLPYVLGSAHQGCLPPFPADVFMIPQYGYLTLNNGSQAVGRSSFYCLEYFPSQMLRTGNNFQFSYTFEDVPFHSSYAHSQSLDRLMNPLIDQYLYYLSRTQTTGTXGTQTLXFSQAGPSSMANQARNWVPGPCYRQQRVSTTTNQNNNSNFAWTGAXKXXLNGRDSLMNPGVAMASHKDDEDRFFPSSGVLIFGKQGAGNDNVDYSXVMITNEEEIKTTNPVATEEYGAVATNXQXLANTQAQTGLVHNQGVLPGMVWQNRDVYLQGPIWAKIPHTDGNFHPSPLMGGFGLKHPPPQILIKNTPVPADPPTTFNQAKLNSFITQYSTGQVSVEIEWELQKENSKRWNPEIQYTSNYYKSTNVDFAVNTEGVYSEPRPIGTRYLTRNL

SEQ ID NO: 139 - protein, 737 aa, Adeno-associated virus
  MOD_RES (148)..(148): Pro or Gln
  MOD_RES (169)..(169): Lys or Arg
  MOD_RES (314)..(314): Arg or Asn
  MOD_RES (466)..(466): Tyr or His
  MOD_RES (563)..(563): Asn or Ser
  MOD_RES (580)..(580): Val or Ile
  MOD_RES (588)..(588): Ala or Ser
MAADGYLPDWLEDNLSEGIREWWDLKPGAPKPKANQQKQDDGRGLVLPGYKYLGPFNGLDKGEPVNAADAAALEHDKAYDQQLKAGDNPYLRYNHADAEFQERLQEDTSFGGNLGRAVFQAKKRVLEPLGLVEEGAKTAPGKKRPVEXSPQRSPDSSTGIGKKGQQPAXKRLNFGQTGDSESVPDPQPLGEPPAAPSGVGSGTMAAGGGAPMADNNEGADGVGNASGNWHCDSTWLGDRVITTSTRTWALPTYNNHLYKQISSQSAGSTNDNTYFGYSTPWGYFDFNRFHCHFSPRDWQRLINNNWGFRPKKLXFKLFNIQVKEVTTNDGVTTIANNLTSTVQVFSDSEYQLPYVLGSAHQGCLPPFPADVFMIPQYGYLTLNNGSQSVGRSSFYCLEYFPSQMLRTGNNFEFSYTFEDVPFHSSYAHSQSLDRLMNPLIDQYLYYLARTQSTTGGTAGNRELQFXQAGPSTMAEQAKNWLPGPCYRQQRVSKTLDQNNNSNFAWTGATKYHLNGRNSLVNPGVAMATHKDDEDRFFPSSGVLIFGKTGAANKTTLENVLMTXEEEIKTTNPVATEEYGXVSSNLQSXNTAPQTQTVNSQGALPGMVWQNRDVYLQGPIWAKIPHTDGNFHPSPLMGGFGLKHPPPQILIKNTPVPANPPEVFTPAKFASFITQYSTGQVSVEIEWELQKENSKRWNPEIQYTSNYDKSTNVDFAVDSEGVYSEPRPIGTRYLTRNL

SEQ ID NO: 140 - protein, 735 aa, Adeno-associated virus
  MOD_RES (162)..(162): Ser or Thr
  MOD_RES (168)..(168): Lys or Arg
  MOD_RES (224)..(224): Ala or Ser
  MOD_RES (310)..(310): Arg or Lys
  MOD_RES (410)..(410): Thr or Gln
  MOD_RES (446)..(446): Ser or Asn
  MOD_RES (461)..(461): Gln or Leu
  MOD_RES (471)..(471): Ala or Ser
  MOD_RES (708)..(708): Ala or Thr
MAADGYLPDWLEDNLSEGIREWWDLKPGAPKPKANQQKQDDGRGLVLPGYKYLGPFNGLDKGEPVNAADAAALEHDKAYDQQLKAGDNPYLRYNHADAEFQERLQEDTSFGGNLGRAVFQAKKRVLEPLGLVEEGAKTAPGKKRPVEQSPQEPDSSSGIGKXGQQPAXKRLNFGQTGDSESVPDPQPLGEPPAAPSGVGSNTMASGGGAPMADNNEGADGVGNXSGNWHCDSTWLGDRVITTSTRTWALPTYNNHLYKQISSQSGASNDNHYFGYSTPWGYFDFNRFHCHFSPRDWQRLINNNWGFRPKXLNFKLFNIQVKEVTTNDGTTTIANNLTSTVQVFTDSEYQLPYVLGSAHQGCLPPFPADVFMIPQYGYLTLNNGSQAVGRSSFYCLEYFPSQMLRTGNNFXFSYTFEDVPFHSSYAHSQSLDRLMNPLIDQYLYYLXRTQTTSGTAQNRELXFSQAGPSSMXNQAKNWLPGPCYRQQRVSKTANDNNNSNFAWTGATKYHLNGRDSLVNPGPAMASHKDDEDKFFPMSGVLIFGKQGAGASNVDLDNVMITDEEEIKTTNPVATEQYGTVATNLQSSNTAPATGTVNSQGALPGMVWQDRDVYLQGPIWAKIPHTDGHFHPSPLMGGFGLKHPPPQILIKNTPVPANPPTTFSPAKFASFITQYSTGQVSVEIEWELQKENSKRWNPEIQYTSNYNKSXNVDFTVDTNGVYSEPRPIGTRYLTRNL

SEQ ID NO: 141 - protein, 735 aa, Adeno-associated virus
  MOD_RES (42)..(42): Gly or Ser
  MOD_RES (168)..(168): Arg or Lys
  MOD_RES (310)..(310): Lys or Arg
  MOD_RES (410)..(410): Thr or Gln
  MOD_RES (446)..(446): Ser or Arg
  MOD_RES (461)..(461): Gln or Leu
  MOD_RES (471)..(471): Ala or Ser
  MOD_RES (475)..(475): Lys or Arg
  MOD_RES (504)..(504): Gly or Ala
  MOD_RES (539)..(539): Val or Asn
MAADGYLPDWLEDNLSEGIREWWDLKPGAPQPKANQQHQDDXRGLVLPGYKYLGPFNGLDKGEPVNEADAAALEHDKAYDQQLKAGDNPYLKYNHADAEFQERLQEDTSFGGNLGRAVFQAKKRVLEPLGLVEEAAKTAPGKKRPVEQSPQEPDSSSGIGKSGQQPAXKRLNFGQTGDSESVPDPQPLGEPPAAPSGVGSNTMASGGGAPMADNNEGADGVGNSSGNWHCDSTWLGDRVITTSTRTWALPTYNNHLYKQISSQSGASNDNHYFGYSTPWGYFDFNRFHCHFSPRDWQRLINNNWGFRPKXLNFKLFNIQVKEVTQNDGTTTIANNLTSTVQVFTDSEYQLPYVLGSAHQGCLPPFPADVFMIPQYGYLTLNNGSQAVGRSSFYCLEYFPSQMLRTGNNFXFSYTFEDVPFHSSYAHSQSLDRLMNPLIDQYLYYLXRTQTTSGTTQQSRLXFSQAGPSSMXQQAXNWLPGPCYRQQRVSKTANDNNNSNFAWTXATKYHLNGRDSLVNPGPAMASHKDDEEKFFPMHGXLIFGKQGTGASNVDLDNVMITDEEEIRTTNPVATEQYGTVATNLQSSNTAPATGTVNSQGALPGMVWQDRDVYLQGPIWAKIPHTDGHFHPSPLMGGFGLKHPPPQILIKNTPVPANPPTTFSPAKFASFITQYSTGQVSVEIEWELQKENSKRWNPEIQYTSNYNKSVNVDFTVDTNGVYSEPRPIGTRYLTRNL

SEQ ID NO: 142 - protein, 736 aa, Adeno-associated virus
MAADGYLPDWLEDNLSEGIREWWDLKPGAPKPKANQQKQDDGRGLVLPGYKYLGPFNGLDKGEPVNAADAAALEHDKAYDQQLKAGDNPYLRYNHADAEFQERLQEDTSFGGNLGRAVFQAKKRVLEPLGLVEEGAKTAPGKKRPVEQSPQEPDSSSGIGKKGQQPARKRLNFGQTGDSESVPDPQPLGEPPAAPSGVGSNTMAAGGGAPMADNNEGADGVGNASGNWHCDSTWLGDRVITTSTRTWALPTYNNHLYKQISSQSGGSTNDNTYFGYSTPWGYFDFNRFHCHFSPRDWQRLINNNWGFRPKKLNFKLFNIQVKEVTTNDGTTTIANNLTSTVQVFTDSEYQLPYVLGSAHQGCLPPFPADVFMIPQYGYLTLNNGSQAVGRSSFYCLEYFPSQMLRTGNNFQFSYTFEDVPFHSSYAHSQSLDRLMNPLIDQYLYYLSRTQTTSGTAGNRTLQFSQAGPSSMANQAKNWLPGPCYRQQRVSKTTNQNNNSNFAWTGATKYHLNGRDSLVNPGPAMATHKDDEDKFFPMSGVLIFGKQGAGNSNVDLDNVMITNEEEIKTTNPVATEEYGTVATNLQSANTAPATGTVNSQGALPGMVWQDRDVYLQGPIWAKIPHTDGHFHPSPLMGGFGLKHPPPQILIKNTPVPANPPTTFSPAKFASFITQYSTGQVSVEIEWELQKENSKRWNPEIQYTSNYNKSTNVDFAVDTNGVYSEPRPIGTRYLTRNL

SEQ ID NO: 143 - protein, 736 aa, Adeno-associated virus
MAADGYLPDWLEDNLSEGIREWWDLKPGAPKPKANQQKQDDGRGLVLPGYKYLGPFNGLDKGEPVNAADAAALEHDKAYDQQLKAGDNPYLRYNHADAEFQERLQEDTSFGGNLGRAVFQAKKRVLEPLGLVEEGAKTAPGKKRPVEQSPQEPDSSSGIGKKGQQPAKKRLNFGQTGDSESVPDPQPLGEPPAAPSGVGSNTMAAGGGAPMADNNEGADGVGNASGNWHCDSTWLGDRVITTSTRTWALPTYNNHLYKQISSQSGASTNDNTYFGYSTPWGYFDFNRFHCHFSPRDWQRLINNNWGFRPKRLNFKLFNIQVKEVTTNDGTTTIANNLTSTVQVFTDSEYQLPYVLGSAHQGCLPPFPADVFMIPQYGYLTLNNGSQAVGRSSFYCLEYFPSQMLRTGNNFEFSYTFEDVPFHSSYAHSQSLDRLMNPLIDQYLYYLSRTQTTSGTAGNRTLQFSQAGPSSMANQAKNWLPGPCYRQQRVSKTANQNNNSNFAWTGATKYHLNGRDSLVNPGPAMATHKDDEDKFFPMSGVLIFGKQGAGNSNVDLDNVMITSEEEIKTTNPVATEQYGTVATNLQSSNTAPATGTVNSQGALPGMVWQNRDVYLQGPIWAKIPHTDGHFHPSPLMGGFGLKHPPPQILIKNTPVPANPPTTFSPAKFASFITQYSTGQVSVEIEWELQKENSKRWNPEIQYTSNYNKSTNVDFAVDTNGVYSEPRPIGTRYLTRNL

SEQ ID NO: 144 - protein, 736 aa, Adeno-associated virus
MAADGYLPDWLEDNLSEGIREWWDLKPGAPKPKANQQKQDDGRGLVLPGYKYLGPFNGLDKGEPVNAADAAALEHDKAYDQQLKAGDNPYLRYNHADAEFQERLQEDTSFGGNLGRAVFQAKKRVLEPLGLVEEGAKTAPGKKRPVEQSPQEPDSSSGIGKKGQQPARKRLNFGQTGDSESVPDPQPLGEPPAAPSGVGSNTMAAGGGAPMADNNEGADGVGNASGNWHCDSTWLGDRVITTSTRTWALPTYNNHLYKQISSQSGGSTNDNTYFGYSTPWGYFDFNRFHCHFSPRDWQRLINNNWGFRPKRLNFKLFNIQVKEVTTNDGTTTIANNLTSTVQVFTDSEYQLPYVLGSAHQGCLPPFPADVFMIPQYGYLTLNNGSQAVGRSSFYCLEYFPSQMLRTGNNFEFSYTFEDVPFHSSYAHSQSLDRLMNPLIDQYLYYLSRTQTTSGTAGNRTLQFSQAGPSSMANQAKNWLPGPCYRQQRVSKTANQNNNSNFAWTGATKYHLNGRDSLVNPGPAMATHKDDEDKFFPMSGVLIFGKQGAGNSNVDLDNVMITNEEEIKTTNPVATEQYGTVATNLQSANTAPATGTVNSQGALPGMVWQDRDVYLQGPIWAKIPHTDGHFHPSPLMGGFGLKHPPPQILIKNTPVPANPPTTFSPAKFASFITQYSTGQVSVEIEWELQKENSKRWNPEIQYTSNYNKSTNVDFAVDTNGVYSEPRPIGTRYLTRNL

SEQ ID NO: 145 - protein, 736 aa, Adeno-associated virus
MAADGYLPDWLEDNLSEGIREWWDLKPGAPKPKANQQKQDDGRGLVLPGYKYLGPFNGLDKGEPVNAADAAALEHDKAYDQQLKAGDNPYLRYNHADAEFQERLQEDTSFGGNLGRAVFQAKKRVLEPLGLVEEGAKTAPGKKRPVEQSPQEPDSSSGIGKKGQQPAKKRLNFGQTGDSESVPDPQPLGEPPAAPSGVGSNTMAAGGGAPMADNNEGADGVGNASGNWHCDSTWLGDRVITTSTRTWALPTYNNHLYKQISSQSGGSTNDNTYFGYSTPWGYFDFNRFHCHFSPRDWQRLINNNWGFRPKKLNFKLFNIQVKEVTTNDGTTTIANNLTSTVQVFTDSEYQLPYVLGSAHQGCLPPFPADVFMIPQYGYLTLNNGSQAVGRSSFYCLEYFPSQMLRTGNNFEFSYTFEDVPFHSSYAHSQSLDRLMNPLIDQYLYYLSRTQTTSGTAGNRTLQFSQAGPSSMANQAKNWLPGPCYRQQRVSKTANQNNNSNFAWTGATKYHLNGRDSLVNPGPAMATHKDDEDKFFPMSGVLIFGKQGAGNSNVDLDNVMITSEEEIKTTNPVATEQYGTVATNLQSSNTAPATGTVNSQGALPGMVWQNRDVYLQGPIWAKIPHTDGHFHPSPLMGGFGLKHPPPQILIKNTPVPANPPTTFSPAKFASFITQYSTGQVSVEIEWELQKENSKRWNPEIQYTSNYNKSTNVDFAVDTNGVYSEPRPIGTRYLTRNL

SEQ ID NO: 146 - protein, 736 aa, Adeno-associated virus
MAADGYLPDWLEDNLSEGIREWWDLKPGAPKPKANQQKQDDGRGLVLPGYKYLGPFNGLDKGEPVNAADAAALEHDKAYDQQLKAGDNPYLRYNHADAEFQERLQEDTSFGGNLGRAVFQAKKRVLEPLGLVEEGAKTAPGKKRPVEQSPQEPDSSSGIGKKGQQPAKKRLNFGQTGDSESVPDPQPLGEPPAAPSGVGSNTMASGGGAPMADNNEGADGVGNASGNWHCDSTWLGDRVITTSTRTWALPTYNNHLYKQISSQSGGSTNDNTYFGYSTPWGYFDFNRFHCHFSPRDWQRLINNNWGFRPKKLNFKLFNIQVKEVTTNDGTTTIANNLTSTVQVFTDSEYQLPYVLGSAHQGCLPPFPADVFMIPQYGYLTLNNGSQAVGRSSFYCLEYFPSQMLRTGNNFEFSYTFEDVPFHSSYAHSQSLDRLMNPLIDQYLYYLSRTQTTSGTAGNRTLQFSQAGPSSMANQAKNWLPGPCYRQQRVSKTANQNNNSNFAWTGATKYHLNGRDSLVNPGPAMATHKDDEDKFFPMSGVLIFGKQGAGNSNVDLDNVMITSEEEIKTTNPVATEEYGTVATNLQSSNTAPATGTVNSQGALPGMVWQNRDVYLQGPIWAKIPHTDGHFHPSPLMGGFGLKHPPPQILIKNTPVPANPPTTFSPAKFASFITQYSTGQVSVEIEWELQKENSKRWNPEIQYTSNYNKSTNVDFAVDTNGVYSEPRPIGTRYLTRNL

SEQ ID NO: 147 - protein, 736 aa, Adeno-associated virus
MAADGYLPDWLEDNLSEGIREWWDLKPGAPKPKANQQKQDDGRGLVLPGYKYLGPFNGLDKGEPVNAADAAALEHDKAYDQQLKAGDNPYLRYNHADAEFQERLQEDTSFGGNLGRAVFQAKKRVLEPLGLVEEGAKTAPGKKRPVEQSPQEPDSSSGIGKKGQQPAKKRLNFGQTGDSESVPDPQPLGEPPAAPSGVGSNTMASGGGAPMADNNEGADGVGNASGNWHCDSTWLGDRVITTSTRTWALPTYNNHLYKQISSQSGGSTNDNTYFGYSTPWGYFDFNRFHCHFSPRDWQRLINNNWGFRPKKLNFKLFNIQVKEVTTNDGTTTIANNLTSTVQVFTDSEYQLPYVLGSAHQGCLPPFPADVFMIPQYGYLTLNNGSQAVGRSSFYCLEYFPSQMLRTGNNFQFSYTFEDVPFHSSYAHSQSLDRLMNPLIDQYLYYLSRTQTTSGTAGNRELQFSQAGPSSMANQAKNWLPGPCYRQQRVSKTTNQNNNSNFAWTGATKYHLNGRDSLVNPGPAMATHKDDEDKFFPMSGVLIFGKQGAGNSNVDLDNVMITNEEEIKTTNPVATEQYGTVATNLQSANTAPATGTVNSQGALPGMVWQDRDVYLQGPIWAKIPHTDGHFHPSPLMGGFGLKHPPPQILIKNTPVPANPPTTFSPAKFASFITQYSTGQVSVEIEWELQKENSKRWNPEIQYTSNYNKSTNVDFAVDTNGVYSEPRPIGTRYLTRNL

SEQ ID NO: 148 - protein, 736 aa, Adeno-associated virus
MAADGYLPDWLEDNLSEGIREWWDLKPGAPKPKANQQKQDDGRGLVLPGYKYLGPFNGLDKGEPVNAADAAALEHDKAYDQQLKAGDNPYLRYNHADAEFQERLQEDTSFGGNLGRAVFQAKKRVLEPLGLVEEGAKTAPGKKRPVEQSPQEPDSSSGIGKKGQQPAKKRLNFGQTGDSESVPDPQPLGEPPAAPSGVGSNTMASGGGAPMADNNEGADGVGNASGNWHCDSTWLGDRVITTSTRTWALPTYNNHLYKQISSQSGASTNDNTYFGYSTPWGYFDFNRFHCHFSPRDWQRLINNNWGFRPKRLNFKLFNIQVKEVTTNDGTTTIANNLTSTVQVFTDSEYQLPYVLGSAHQGCLPPFPADVFMIPQYGYLTLNNGSQAVGRSSFYCLEYFPSQMLRTGNNFQFSYTFEDVPFHSSYAHSQSLDRLMNPLIDQYLYYLSRTQTTSGTAGNRELQFSQAGPSSMANQAKNWLPGPCYRQQRVSKTTNQNNNSNFAWTGATKYHLNGRDSLVNPGPAMATHKDDEDKFFPMSGVLIFGKQGAGNSNVDLDNVMITNEEEIKTTNPVATEEYGTVATNLQSANTAPATGTVNSQGALPGMVWQNRDVYLQGPIWAKIPHTDGHFHPSPLMGGFGLKHPPPQILIKNTPVPANPPTTFSPAKFASFITQYSTGQVSVEIEWELQKENSKRWNPEIQYTSNYNKSTNVDFAVDTNGVYSEPRPIGTRYLTRNL

SEQ ID NO: 149 - protein, 736 aa, Adeno-associated virus
MAADGYLPDWLEDNLSEGIREWWDLKPGAPKPKANQQKQDDGRGLVLPGYKYLGPFNGLDKGEPVNAADAAALEHDKAYDQQLKAGDNPYLRYNHADAEFQERLQEDTSFGGNLGRAVFQAKKRVLEPLGLVEEGAKTAPGKKRPVEQSPQEPDSSSGIGKKGQQPARKRLNFGQTGDSESVPDPQPLGEPPAAPSGVGSNTMAAGGGAPMADNNEGADGVGNASGNWHCDSTWLGDRVITTSTRTWALPTYNNHLYKQISSQSGGSTNDNTYFGYSTPWGYFDFNRFHCHFSPRDWQRLINNNWGFRPKRLNFKLFNIQVKEVTTNDGTTTIANNLTSTVQVFTDSEYQLPYVLGSAHQGCLPPFPADVFMIPQYGYLTLNNGSQAVGRSSFYCLEYFPSQMLRTGNNFEFSYTFEDVPFHSSYAHSQSLDRLMNPLIDQYLYYLSRTQTTSGTAGNRELQFSQAGPSSMANQAKNWLPGPCYRQQRVSKTTNQNNNSNFAWTGATKYHLNGRDSLVNPGPAMATHKDDEDKFFPMSGVLIFGKQGAGNSNVDLDNVMITSEEEIKTTNPVATEEYGTVATNLQSSNTAPATGTVNSQGALPGMVWQERDVYLQGPIWAKIPHTDGHFHPSPLMGGFGLKHPPPQILIKNTPVPANPPTTFSPAKFASFITQYSTGQVSVEIEWELQKENSKRWNPEIQYTSNYNKSTNVDFAVDTNGVYSEPRPIGTRYLTRNL

SEQ ID NO: 150 - protein, 736 aa, Adeno-associated virus
MAADGYLPDWLEDNLSEGIREWWDLKPGAPKPKANQQKQDDGRGLVLPGYKYLGPFNGLDKGEPVNAADAAALEHDKAYDQQLKAGDNPYLRYNHADAEFQERLQEDTSFGGNLGRAVFQAKKRVLEPLGLVEEGAKTAPGKKRPVEQSPQEPDSSSGIGKKGQQPARKRLNFGQTGDSESVPDPQPLGEPPAAPSGVGSNTMASGGGAPMADNNEGADGVGNASGNWHCDSTWLGDRVITTSTRTWALPTYNNHLYKQISSQSGGSTNDNTYFGYSTPWGYFDFNRFHCHFSPRDWQRLINNNWGFRPKKLNFKLFNIQVKEVTTNDGTTTIANNLTSTVQVFTDSEYQLPYVLGSAHQGCLPPFPADVFMIPQYGYLTLNNGSQAVGRSSFYCLEYFPSQMLRTGNNFEFSYTFEDVPFHSSYAHSQSLDRLMNPLIDQYLYYLSRTQTTSGTAGNRELQFSQAGPSSMANQAKNWLPGPCYRQQRVSKTTNQNNNSNFAWTGATKYHLNGRDSLVNPGPAMATHKDDEDKFFPMSGVLIFGKQGAGNSNVDLDNVMITSEEEIKTTNPVATEEYGTVATNLQSANTAPATGTVNSQGALPGMVWQDRDVYLQGPIWAKIPHTDGHFHPSPLMGGFGLKHPPPQILIKNTPVPANPPTTFSPAKFASFITQYSTGQVSVEIEWELQKENSKRWNPEIQYTSNYNKSTNVDFAVDTNGVYSEPRPIGTRYLTRNL

SEQ ID NO: 151 - protein, 738 aa, Adeno-associated virus
MAADGYLPDWLEDNLSEGIREWWDLKPGAPKPKANQQKQDDGRGLVLPGYKYLGPFNGLDKGEPVNAADAAALEHDKAYDQQLKAGDNPYLRYNHADAEFQERLQEDTSFGGNLGRAVFQAKKRVLEPLGLVEEGAKTAPGKKRPVEQSPQREPDSSTGIGKSGQQPAKKRLNFGQTGDSESVPDPQPLGEPPAAPSGVGSNTMASGGGAPMADNNEGADGVGNSSGNWHCDSTWLGDRVITTSTRTWALPTYNNHLYKQISNGTSGGSTNDNTYFGYSTPWGYFDFNRFHCHFSPRDWQRLINNNWGFRPKRLNFKLFNIQVKEVTTNEGTKTIANNLTSTVQVFTDSEYQLPYVLGSAHQGCLPPFPADVFMIPQYGYLTLNNGSQAVGRSSFYCLEYFPSQMLRTGNNFQFSYTFEDVPFHSSYAHSQSLDRLMNPLIDQYLYYLSRTQTTGGTAGTQTLQFSQAGPSSMANQARNWVPGPCYRQQRVSTTTNQNNNSNFAWTGATKYHLNGRDSLMNPGVAMASHKDDEDRFFPSSGVLIFGKQGAGNDNVDYSNVMITSEEEIKTTNPVATEEYGVVATNHQSANTQAQTGTVQNQGILPGMVWQNRDVYLQGPIWAKIPHTDGNFHPSPLMGGFGLKHPPPQILIKNTPVPADPPTTFNQAKLNSFITQYSTGQVSVEIEWELQKENSKRWNPEIQYTSNYYKSTNVDFAVNTEGVYSEPRPIGTRYLTRNL

SEQ ID NO: 152 - protein, 738 aa, Artificial Sequence
  Description of Artificial Sequence: Synthetic polypeptide
MAADGYLPDWLEDNLSEGIREWWDLKPGAPKPKANQQKQDNGRGLVLPGYKYLGPFNGLDKGEPVNAADAAALEHDKAYDQQLQAGDNPYLRYNHADAEFQERLQEDTSFGGNLGRAVFQAKKRVLEPLGLVESPVKTAPGKKRPVEPSPQRSPDSSTGIGKKGQQPAKKRLNFGQTGDSESVPDPQPIGEPPAGPSGLGSGTMAAGGGAPMADNNEGADGVGSSSGNWHCDSTWLGDRVITTSTRTWALPTYNNHLYKQISNGTSGGSTNDNTYFGYSTPWGYFDFNRFHCHFSPRDWQRLINNNWGFRPKRLNFKLFNIQVKEVTQNEGTKTIANNLTSTIQVFTDSEYQLPYVLGSAHQGCLPPFPADVFMIPQYGYLTLNNGSQAVGRSSFYCLEYFPSQMLRTGNNFEFSYNFEDVPFHSSYAHSQSLDRLMNPLIDQYLYYLSRTQSTGGTAGTQQLLFSQAGPNNMSAQAKNWLPGPCYRQQRVSTTLSQNNNSNFAWTGATKYHLNGRDSLVNPGVAMATHKDDEERFFPSSGVLMFGKQGAGKDNVDYSSVMLTSEEEIKTTNPVATEQYGVVADNLQQQNAAPIVGAVNSQGALPGMVWQNRDVYLQGPIWAKIPHTDGNFHPSPLMGGFGLKHPPPQLLIKNTPVPADPPTTFNQAKLASFLTQYSTGQVSVEIEWELQKENSKRWNPEIQYTSNYYKSTNVDFAVNTEGTYSEPRPIGTRYLTRNL

SEQ ID NO: 153 - protein, 7 aa, Artificial Sequence
  Description of Artificial Sequence: Synthetic peptide
RGDLRVS

SEQ ID NO: 154 - protein, 7 aa, Artificial Sequence
  Description of Artificial Sequence: Synthetic peptide
RGDAVGV

SEQ ID NO: 155 - protein, 8 aa, Artificial Sequence
  Description of Artificial Sequence: Synthetic peptide
RGDFTPTS

SEQ ID NO: 156 - protein, 7 aa, Artificial Sequence
  Description of Artificial Sequence: Synthetic peptide
RGDLGLS

SEQ ID NO: 157 - protein, 7 aa, Artificial Sequence
  Description of Artificial Sequence: Synthetic peptide
RGDMSRE

SEQ ID NO: 158 - protein, 743 aa, Artificial Sequence
  Description of Artificial Sequence: Synthetic polypeptide
MAADGYLPDWLEDNLSEGIREWWALKPGAPQPKANQQHQDNARGLVLPGYKYLGPGNGLDKGEPVNAADAAALEHDKAYDQQLKAGDNPYLKYNHADAEFQERLKEDTSFGGNLGRAVFQAKKRLLEPLGLVEEAAKTAPGKKRPVEQSPQEPDSSAGIGKSGAQPAKKRLNFGQTGDTESVPDPQPIGEPPAAPSGVGSLTMASGGGAPVADNNEGADGVGSSSGNWHCDSQWLGDRVITTSTRTWALPTYNNHLYKQISNSTSGGSSNDNAYFGYSTPWGYFDFNRFHCHFSPRDWQRLINNNWGFRPKRLNFKLFNIQVKEVTDNNGVKTIANNLTSTVQVFTDSDYQLPYVLGSAHEGCLPPFPADVFMIPQYGYLTLNDGSQAVGRSSFYCLEYFPSQMLRTGNNFQFSYEFENVPFHSSYAHSQSLDRLMNPLIDQYLYYLSKTINGSGQNQQTLKFSVAGPSNMAVQGRNYIPGPSYRQQRVSTTVTQNNNSEFAWPGASSWALNGRNSLMNPGPAMASHKEGEDRFFPLSGSLIFGKQGTGRDNVDADKVMITNEEEIKTTNPVATESYGQVATNHQSAQRGDLLLSAQAQTGWVQNQGILPGMVWQDRDVYLQGPIWAKIPHTDGNFHPSPLMGGFGMKHPPPQILIKNTPVPADPPTAFNKDKLNSFITQYSTGQVSVEIEWELQKENSKRWNPEIQYTSNYYKSNNVEFAVNTEGVYSEPRPIGTRYLTRNL

SEQ ID NO: 159 - protein, 743 aa, Artificial Sequence
  Description of Artificial Sequence: Synthetic polypeptide
MAADGYLPDWLEDNLSEGIREWWALKPGAPQPKANQQHQDNARGLVLPGYKYLGPGNGLDKGEPVNAADAAALEHDKAYDQQLKAGDNPYLKYNHADAEFQERLKEDTSFGGNLGRAVFQAKKRLLEPLGLVEEAAKTAPGKKRPVEQSPQEPDSSAGIGKSGAQPAKKRLNFGQTGDTESVPDPQPIGEPPAAPSGVGSLTMASGGGAPVADNNEGADGVGSSSGNWHCDSQWLGDRVITTSTRTWALPTYNNHLYKQISNSTSGASTNDNAYFGYSTPWGYFDFNRFHCHFSPRDWQRLINNNWGFRPKRLNFKLFNIQVKEVTDNNGVKTIANNLTSTVQVFTDSDYQLPYVLGSAHEGCLPPFPADVFMIPQYGYLTLNDGSQAVGRSSFYCLEYFPSQMLRTGNNFQFSYEFENVPFHSSYAHSQSLDRLMNPLIDQYLYYLSKTINGSGQNQQTLKFSVAGPSNMAVQGRNYIPGPSYRQQRVSTTVTQNNNSEFAWPGASSWALNGRNSLMNPGPAMASHKEGEDRFFPLSGSLIFGKQGTGRDNVDADKVMITNEEEIKTTNPVATESYGQVATNHQSAQRGDLLLSAQAQTGWVQNQGILPGMVWQDRDVYLQGPIWAKIPHTDGNFHPSPLMGGFGMKHPPPQILIKNTPVPADPPTAFNKDKLNSFITQYSTGQVSVEIEWELQKENSKRWNPEIQYTSNYYKSNNVEFAVNTEGVYSEPRPIGTRYLTRNL

SEQ ID NO: 160 - protein, 8 aa, Artificial Sequence
  Description of Artificial Sequence: Synthetic peptide
NSTSGASS

SEQ ID NO: 161 - protein, 8 aa, Artificial Sequence
  Description of Artificial Sequence: Synthetic peptide
NSTSGGST

SEQ ID NO: 162 - protein, 8 aa, Artificial Sequence
  Description of Artificial Sequence: Synthetic peptide
NSTSGAST

SEQ ID NO: 163 - protein, 736 aa, Artificial Sequence
  Description of Artificial Sequence: Synthetic polypeptide
MAADGYLPDWLEDNLSEGIREWWALKPGAPQPKANQQHQDNARGLVLPGYKYLGPGNGLDKGEPVNAADAAALEHDKAYDQQLKAGDNPYLKYNHADAEFQERLKEDTSFGGNLGRAVFQAKKRLLEPLGLVEEAAKTAPGKKRPVEQSPQEPDSSAGIGKSGAQPAKKRLNFGQTGDTESVPDPQPIGEPPAAPSGVGSLTMASGGGAPVADNNEGADGVGSSSGNWHCDSQWLGDRVITTSTRTWALPTYNNHLYKQISNSTSGASTNDNAYFGYSTPWGYFDFNRFHCHFSPRDWQRLINNNWGFRPKRLNFKLFNIQVKEVTDNNGVKTIANNLTSTVQVFTDSDYQLPYVLGSAHEGCLPPFPADVFMIPQYGYLTLNDGSQAVGRSSFYCLEYFPSQMLRTGNNFQFSYEFENVPFHSSYAHSQSLDRLMNPLIDQYLYYLSKTINGSGQNQQTLKFSVAGPSNMAVQGRNYIPGPSYRQQRVSTTVTQNNNSEFAWPGASSWALNGRNSLMNPGPAMASHKEGEDRFFPLSGSLIFGKQGTGRDNVDADKVMITNEEEIKTTNPVATESYGQVATNHQSAQAQAQTGWVQNQGILPGMVWQDRDVYLQGPIWAKIPHTDGNFHPSPLMGGFGMKHPPPQILIKNTPVPADPPTAFNKDKLNSFITQYSTGQVSVEIEWELQKENSKRWNPEIQYTSNYYKSNNVEFAVNTEGVYSEPRPIGTRYLTRNL

SEQ ID NO: 164 - protein, 458 aa, Artificial Sequence
  Description of Artificial Sequence: Synthetic polypeptide
RDLTEAVPRLPGETLITDKEVIYICPFNGPIKGRVYITNYRLYLRSLETDSSLILDVPLGVISRIEKMGGATSRGENSYGLDITCKDMRNLRFALKQEGHSRRDMFEILTRYAFPLAHSLPLFAFLNEEKFNVDGWTVYNPVEEYRRQGLPNHHWRITFINKCYELCDTYPALLVVPYRASDDDLRRVATFRSRNRIPVLSWIHPENKTVIVRCSQPLVGMSGKRNKDDEKYLDVIRETNKQISKLTIYDARPSVNAVANKATGGGYESDDAYHNAELFFLDIHNIHVMRESLKKVKDIVYPNVEESHWLSSLESTHWLEHIKLVLTGAIQVADKVSSGKSSVLVHCSDGWDRTAQLTSLAMLMLDSFYRSIEGFEILVQKEWISFGHKFASRIGHGDKNHTDADRSPIFLQFIDCVWQMSKQFPTAFEFNEQFLIIILDHLYSCRFGTFLFNCESAR

SEQ ID NO: 165 - protein, 603 aa, Artificial Sequence
  Description of Artificial Sequence: Synthetic polypeptide
MASASTSKYNSHSLENESIKRTSRDGVNRDLTEAVPRLPGETLITDKEVIYICPFNGPIKGRVYITNYRLYLRSLETDSSLILDVPLGVISRIEKMGGATSRGENSYGLDITCKDMRNLRFALKQEGHSRRDMFEILTRYAFPLAHSLPLFAFLNEEKFNVDGWTVYNPVEEYRRQGLPNHHWRITFINKCYELCDTYPALLVVPYRASDDDLRRVATFRSRNRIPVLSWIHPENKTVIVRCSQPLVGMSGKRNKDDEKYLDVIRETNKQISKLTIYDARPSVNAVANKATGGGYESDDAYHNAELFFLDIHNIHVMRESLKKVKDIVYPNVEESHWLSSLESTHWLEHIKLVLTGAIQVADKVSSGKSSVLVHCSDGWDRTAQLTSLAMLMLDSFYRSIEGFEILVQKEWISFGHKFASRIGHGDKNHTDADRSPIFLQFIDCVWQMSKQFPTAFEFNEQFLIIILDHLYSCRFGTFLFNCESARERQKVTERTVSLWSLINSNKEKFKNPFYTKEINRVLYPVASMRHLELWVNYYIRWNPRIKQQQPNPVEQRYMELLALRDEYIKRLEELQLANSAKLSDPPTSPSSPSQMMPHVQTHF

SEQ ID NO: 166 - DNA, 1812 bp, Artificial Sequence
  Description of Artificial Sequence: Synthetic polynucleotide
atggcttctgcatcaacttctaaatataattcacactccttggagaatgagtctattaagaggacgtctcgagatggagtcaatcgagatctcactgaggctgttcctcgacttccaggagaaacactaatcactgacaaagaagttatttacatatgtcctttcaatggccccattaagggaagagtttacatcacaaattatcgtctttatttaagaagtttggaaacggattcttctctaatacttgatgttcctctgggtgtgatctcgagaattgaaaaaatgggaggcgcgacaagtagaggagaaaattcctatggtctagatattacttgtaaagacatgagaaacctgaggttcgctttgaaacaggaaggccacagcagaagagatatgtttgagatcctcacgagatacgcgtttcccctggctcacagtctgccattatttgcatttttaaatgaagaaaagtttaacgtggatggatggacagtttacaatccagtggaagaatacaggaggcagggcttgcccaatcaccattggagaataacttttattaataagtgctatgagctctgtgacacttaccctgctcttttggtggttccgtatcgtgcctcagatgatgacctccggagagttgcaacttttaggtcccgaaatcgaattccagtgctgtcatggattcatccagaaaataagacggtcattgtgcgttgcagtcagcctcttgtcggtatgagtgggaaacgaaataaagatgatgagaaatatctcgatgttatcagggagactaataaacaaatttctaaactcaccatttatgatgcaagacccagcgtaaatgcagtggccaacaaggcaacaggaggaggatatgaaagtgatgatgcatatcataacgccgaacttttcttcttagacattcataatattcatgttatgcgggaatctttaaaaaaagtgaaggacattgtttatcctaatgtagaagaatctcattggttgtccagtttggagtctactcattggttagaacatatcaagctcgttttgacaggagccattcaagtagcagacaaagtttcttcagggaagagttcagtgcttgtgcattgcagtgacggatgggacaggactgctcagctgacatccttggccatgctgatgttggatagcttctataggagcattgaagggttcgaaatactggtacaaaaagaatggataagttttggacataaatttgcatctcgaataggtcatggtgataaaaaccacaccgatgctgaccgttctcctatttttctccagtttattgattgtgtgtggcaaatgtcaaaacagttccctacagcttttgaattcaatgaacaatttttgattataattttggatcatctgtatagttgccgatttggtactttcttattcaactgtgaatctgctcgagaaagacagaaggttacagaaaggactgtttctttatggtcactgataaacagtaataaagaaaaattcaaaaaccccttctatactaaagaaatcaatcgagttttatatccagttgccagtatgcgtcacttggaactctgggtgaattactacattagatggaaccccaggatcaagcaacaacagccgaatccagtggagcagcgttacatggagctcttagccttacgcgacgaatacataaagcggcttgaggaactgcagctcgccaactctgccaagctttctgatcccccaacttcaccttccagtccttcgcaaatgatgccccatgtgcaaactcacttttaa

SEQ ID NO: 167 - DNA, 1812 bp, Artificial Sequence
  Description of Artificial Sequence: Synthetic polynucleotide
ttaaaagtgggtctggacgtggggcatcatctgtgaggggctgcttggtgaagtaggtgggtcggacagcttggcgctattggccagctgcagctcctccagcctcttgatatactcatctctcagggccagcagctccatgtaccgctgctccacagggttgggctgctgctgcttgatccggggattccagcggatatagtagttcacccacagctccaggtgtctcatggatgccacaggatacagcacgcgattgatctcctttgtgtagaaggggttcttgaacttctccttattgctgttgatcaggctccacagagacactgtgcgctcggtcaccttctgcctctctctggcagactcacaattaaacaggaatgtgccgaacctgcaggagtacaggtggtccaggatgatgatcagaaactgctcgttaaactcgaaggcggttgggaactgcttggacatctgccacacgcagtcgataaactgcaggaagatagggctgcggtcggcatcggtgtgattcttatcgccgtggccgatcctggaggcaaacttgtggccgaagctgatccactccttctgcaccaggatctcaaagccctcgatagatctatagaaggagtccagcatcagcatagccaggcttgtcagctgtgctgttctgtcccacccatcggaacagtgcaccagcacggagctcttgccagaggacaccttatcggccacctggatggcgcctgtcagcaccagcttgatgtgctccagccagtgggtagactccaggctagacagccagtgggactcctccacgtttgggtacacgatgtccttcaccttcttcagggactctctcatcacgtggatattgtggatatccagaaagaacagctcggcgttgtgataggcgtcatcagactcatatcctcctcctgttgccttatttgccactgcattcacagaaggccgggcatcatagattgtcagcttgctgatctgcttatttgtctctctgatcacatccaggtacttctcgtcatccttgttccgcttgccagacattcccaccagtggctgggagcagcgcacgatcactgtcttattctctgggtggatccagctcagcacagggattctgttccggctccggaaggtggccactctccgcaggtcatcgtcgctggctctgtagggcaccaccagcagggctggatatgtatcgcacagctcgtagcacttattgataaaggtgatccgccagtggtggttaggcaggccctggcgcctatactcctccacggggttgtacactgtccagccgtccacattgaacttctcctcgttcagaaaggcgaacagaggcagagagtgggccaggggaaaggcatatctggtcaggatctcgaacatatctctccgggagtggccctcctgcttcagggcaaaccgcagattgcgcatgtccttacaggtgatatccaggccgtagctgttctctcccctagaggtggctcctcccatcttctcgattctgctgatcacgcccagaggcacgtccaggatcagggagctatctgtctccaggctccgcaggtacagtctgtaattggtgatatacacgcggcccttgattgggccgttgaaagggcagatgtagatcacttccttgtctgtgatcagtgtctctccaggcagccttggcactgcctctgtcagatctctattgaccccgtcccttgaggttctcttgatgctctcgttttccaggctatgtgagttgtatttgcttgtgcttgctgatgccat

SEQ ID NO: 168 - DNA, 1812 bp, Artificial Sequence
  Description of Artificial Sequence: Synthetic polynucleotide
atggcttctgcatcaacttctaaatataattcacactccttggagaatgagtctattaagaggacgtctcgagatggagtcaatcgagatctcactgaggctgttcctcgacttccaggagaaacactaatcactgacaaagaagttatttacatatgtcctttcaatggccccattaagggaagagtttacatcacaaattatcgtctttatttaagaagtttggaaacggattcttctctaatacttgatgttcctctgggtgtgatctcgagaattgaaaaaatgggaggcgcgacaagtagaggagaaaattcctatggtctagatattacttgtaaagacatgagaaacctgaggttcgctttgaaacaggaaggccacagcagaagagatatgtttgagatcctcacgagatacgcgtttcccctggctcacagtctgccattatttgcatttttaaatgaagaaaagtttaacgtggatggatggacagtttacaatccagtggaagaatacaggaggcagggcttgcccaatcaccattggagaataacttttattaataagtgctatgagctctgtgacacttaccctgctcttttggtggttccgtatcgtgcctcagatgatgacctccggagagttgcaacttttaggtcccgaaatcgaattccagtgctgtcatggattcatccagaaaataagacggtcattgtgcgttgcagtcagcctcttgtcggtatgagtgggaaacgaaataaagatgatgagaaatatctcgatgttatcagggagactaataaacaaatttctaaactcaccatttatgatgcaagacccagcgtaaatgcagtggccaacaaggcaacaggaggaggatatgaaagtgatgatgcatatcataacgccgaacttttcttcttagacattcataatattcatgttatgcgggaatctttaaaaaaagtgaaggacattgtttatcctaatgtagaagaatctcattggttgtccagtttggagtctactcattggttagaacatatcaagctcgttttgacaggagccattcaagtagcagacaaagtttcttcagggaagagttcagtgcttgtgcattgcagtgacggatgggacaggactgctcagctgacatccttggccatgctgatgttggatagcttctataggagcattgaagggttcgaaatactggtacaaaaagaatggataagttttggacataaatttgcatctcgaataggtcatggtgataaaaaccacaccgatgctgaccgttctcctatttttctccagtttattgattgtgtgtggcaaatgtcaaaacagttccctacagcttttgaattcaatgaacaatttttgattataattttggatcatctgtatagttgccgatttggtactttcttattcaactgtgaatctgctcgagaaagacagaaggttacagaaaggactgtttctttatggtcactgataaacagtaataaagaaaaattcaaaaacccattctatactaaagaaatcaatagagttttatatccagttgcaagtatgcgtcacttggaactctgggtgaattactacattagatggaaccccaggatcaaacaacaacaaccaaatccagtggaacaacgttacatggaactcttagccttacgagatgaatacataaaacggcttgaggaactgcaactagcaaactctgcaaaactttctgatcccccaacttcaccttccagtccttctcaaatgatgccacatgtgcaaactcacttttaa

SEQ ID NO: 169 - DNA, 1812 bp, Artificial Sequence
  Description of Artificial Sequence: Synthetic polynucleotide
atggcctctgccagcacctctaagtacaacagccactccctggaaaatgaatccatcaaaaggaccagcagagatggagtgaacagagacctaactgaagctgtgccaagactgcctggagagaccctgatcacagacaaggaagtgatctacatctgccccttcaatggccctatcaagggaagggtgtacatcaccaactacaggctttacctgagatccctggagacagacagcagcctgatcctggatgtgcctctgggagtgatcagcagaatagagaagatggggggtgccaccagcagaggagagaacagctatggcctggacatcacctgcaaggacatgagaaacctgagatttgccctgaagcaggagggccacagcagaagagacatgtttgaaatcctgaccaggtatgccttccccctggcccactctctccccctgtttgccttcctgaatgaggaaaagttcaatgttgatggctggacagtgtacaacccagtggaggagtacagaagacagggcctgcctaaccaccactggaggatcaccttcatcaacaagtgctatgaactgtgtgacacataccctgccctgctggtggtgccttacagagcctcagatgatgacctgagaagagttgccaccttcagaagcaggaacagaatccctgtactgagctggatccaccctgagaataagactgtgattgtgaggtgcagccagcccctggtgggcatgagtggcaagagaaacaaagatgatgaaaagtacctggatgtgatcagagagaccaacaaacagatcagcaagctcaccatctatgatgctagaccctctgttaatgctgtggccaacaaggccacagggggaggctatgaatctgatgatgcttaccacaatgctgagctgttcttcctggacatccacaacatccatgtgatgagagaatccctcaagaaagtgaaggacattgtgtaccctaatgtggaagaaagtcactggctgagcagcttggagtccacccactggctggagcacatcaagctggtcctgacaggagccatccaggtggctgacaaggtgagttctggcaagtcctcagtgctggtccactgctctgatggctgggacagaactgcccagctgaccagtctggccatgctgatgctggactccttctacagaagcattgaaggctttgaaatcctggtgcaaaaggaatggatctcttttggccacaagtttgccagcagaattggccatggtgacaaaaaccacacagatgctgacagaagccctatcttcctgcagttcattgactgtgtgtggcagatgagcaagcagttccccacagcatttgagttcaatgagcagttcctaataatcatcctggaccacctctacagctgcagatttggcaccttcctgttcaactgtgagtctgccagagaaagacagaaggtgacagagaggacagtgagcctgtggagcctgatcaactccaacaaggagaagttcaagaaccccttctacaccaaggaaatcaacagggtgctgtaccctgtggctagcatgaggcacctggagctgtgggtcaactactacatcagatggaaccctagaatcaaacagcaacaacccaaccctgtggagcagaggtacatggagttactggccctgagggatgagtacatcaagagactggaggagctgcagctggccaactctgccaaactgtctgaccctcctacctcccccagctccccctctcagatgatgccacatgtgcagacccacttttaa

SEQ ID NO: 170 - DNA, 1812 bp, Artificial Sequence
  Description of Artificial Sequence: Synthetic polynucleotide
ttaaaagtgggtctgcacgtgaggcatcatctggctggggctgctagggcttgtaggaggatcgctcagcttggcgctgttggccagctgcagttcttccagtctcttgatgtactcgtcccgcagggccagcagttccatgtaccgctgttccacaggattgggctgctgctgcttgattctggggttccaccggatgtagtagttgacccacagttccagatgtctcatgctggccacggggtacagcacccggttgatttctttggtgtagaaggggttcttgaatttctctttgttgctgttgatcagggaccacagagacacggtccgctcggtcactttctgccgttctctggcgctctcgcagttgaacaggaaggtgccgaatctgcagctgtacaggtggtccaggatgatgatcaggaactgctcgttgaactcgaaggcggtagggaactgcttggacatctgccacacgcagtcgatgaactgcaggaagatggggcttctatcggcgtcggtgtggttcttgtcgccgtgtccgattctgctggcgaacttgtggccgaagctgatccactctttctgcaccaggatctcaaagccctcgatggatctgtagaagctgtccagcatcagcatggccagagatgtcagctgggctgttctatcccagccgtcgctacagtgcaccagcacgctagacttgccagaggacaccttatcggccacctggatggcgcctgtcagcaccagcttgatgtgttccagccagtgtgtgctttccagactgctcagccagtggctctcttccacattggggtacacgatgtccttcactttcttcaggctttcccgcatcacgtggatgttgtggatgtccagaaagaacagctcggcgttatgataggcgtcgtcgctctcgtatccgccgcctgtagctttgttggccacggcgttcacgctaggtctggcgtcgtagatggtcagcttgctgatctgcttgtttgtctcgcggatcacgtccaggtacttctcgtcgtccttgtttctcttgccagacatgcccacgaggggctgagaacaccgcacgatcacggtcttgttctcggggtgaatccagctcagcacagggattctgttccggctccgaaaggtggccactcttctcaggtcgtcgtcggaggctctgtaaggcaccaccagcagtgcggggtatgtgtcgcacagctcgtagcacttgttgatgaaggtgatccgccagtggtgattaggcaggccctgtctccgatactcttccacggggttgtacacggtccagccgtccacgttgaacttctcttcgttcaggaaggcgaacagaggcagggagtgagccagaggaaaggcgtatctggtcaggatctcgaacatgtcccgtctgctgtggccctcttgcttcagggcgaatctcaggttccgcatgtccttgcatgtgatgtccaggccgtagctattctcgcctctggaggtggctccgcccattttctcaatccggctgatcacgcccaggggcacatccaggatcaggctgctatcggtttccagggaccgcaggtacagccggtagttggtgatgtacacgcggcccttgatggggccgttgaaggggcagatgtagatcacttctttgtcggtgatcagtgtctcgccaggcagtctaggcacggcctctgtcagatccctgttcacgccatctctgctggtccgcttgatgctctcgttttccaggctgtggctgttgtacttgcttgtgctggcgctagccat

SEQ ID NO: 171 - DNA, 382 bp, Artificial Sequence
  Description of Artificial Sequence: Synthetic polynucleotide
gacattgattattgactagttattaatagtaatcaattacggggtcattagttcatagcccatatatggagttccgcgttacataacttacggtaaatggcccgcctggctgaccgcccaacgacccccgcccattgacgtcaataatgacgtatgttcccatagtaacgccaatagggactttccattgacgtcaatgggtggagtatttacggtaaactgcccacttggcagtacatcaagtgtatcatatgccaagtacgccccctattgacgtcaatgacggtaaatggcccgcctggcattatgcccagtacatgaccttatgggactttcctacttggcagtacatctacgtattagtcatcgctattaccatggt

SEQ ID NO: 172 - DNA, 278 bp, Artificial Sequence
  Description of Artificial Sequence: Synthetic polynucleotide
tcgaggtgagccccacgttctgcttcactctccccatctcccccccctccccacccccaattttgtatttatttattttttaattattttgtgcagcgatgggggcggggggggggggggggcgcgcgccaggcggggcggggcggggcgaggggcggggcggggcgaggcggagaggtgcggcggcagccaatcagagcggcgcgctccgaaagtttccttttatggcgaggcggcggcggcggcggccctataaaaagcgaagcgcgcggcgggcg

SEQ ID NO: 173 - DNA, 660 bp, Artificial Sequence
  Description of Artificial Sequence: Synthetic polynucleotide
gacattgattattgactagttattaatagtaatcaattacggggtcattagttcatagcccatatatggagttccgcgttacataacttacggtaaatggcccgcctggctgaccgcccaacgacccccgcccattgacgtcaataatgacgtatgttcccatagtaacgccaatagggactttccattgacgtcaatgggtggagtatttacggtaaactgcccacttggcagtacatcaagtgtatcatatgccaagtacgccccctattgacgtcaatgacggtaaatggcccgcctggcattatgcccagtacatgaccttatgggactttcctacttggcagtacatctacgtattagtcatcgctattaccatggttcgaggtgagccccacgttctgcttcactctccccatctcccccccctccccacccccaattttgtatttatttattttttaattattttgtgcagcgatgggggcggggggggggggggggcgcgcgccaggcggggcggggcggggcgaggggcggggcggggcgaggcggagaggtgcggcggcagccaatcagagcggcgcgctccgaaagtttccttttatggcgaggcggcggcggcggcggccctataaaaagcgaagcgcgcggcgggcg

SEQ ID NO: 174 - DNA, 347 bp, Artificial Sequence
  Description of Artificial Sequence: Synthetic polynucleotide
aaaaaatgctttcttcttttaatatacttttttgtttatcttatttctaatactttccctaatctctttctttcagggcaataatgatacaatgtatcatgcctctttgcaccattctaaagaataacagtgataatttctgggttaaggcaatagcaatatttctgcatataaatatttctgcatataaattgtaactgatgtaagaggtttcatattgctaatagcagctacaatccagctaccattctgcttttattttatggttgggataaggctggattattctgagtccaagctaggcccttttgctaatcatgttcatacctcttatcttcctcccacag

SEQ ID NO: 175 - DNA, 69 bp, Artificial Sequence
  Description of Artificial Sequence: Synthetic oligonucleotide
gtgcattggaacgcggattccccgtgccaagagtgacgtaagtaccgcctatagagtctataggcccac

SEQ ID NO: 176 - DNA, 416 bp, Artificial Sequence
  Description of Artificial Sequence: Synthetic polynucleotide
gtgcattggaacgcggattccccgtgccaagagtgacgtaagtaccgcctatagagtctataggcccacaaaaaatgctttcttcttttaatatacttttttgtttatcttatttctaatactttccctaatctctttctttcagggcaataatgatacaatgtatcatgcctctttgcaccattctaaagaataacagtgataatttctgggttaaggcaatagcaatatttctgcatataaatatttctgcatataaattgtaactgatgtaagaggtttcatattgctaatagcagctacaatccagctaccattctgcttttattttatggttgggataaggctggattattctgagtccaagctaggcccttttgctaatcatgttcatacctcttatcttcctcccacag

SEQ ID NO: 177 - DNA, 123 bp, Artificial Sequence
  Description of Artificial Sequence: Synthetic polynucleotide
gatctttttccctctgccaaaaattatggggacatcatgaagccccttgagcatctgacttctggctaataaaggaaatttattttcattgcaatagtgtgttggaattttttgtgtctctca

SEQ ID NO: 178 - DNA, 145 bp, Artificial Sequence
  Description of Artificial Sequence: Synthetic polynucleotide
ttggccactccctctctgcgcgctcgctcgctcactgaggccgcccgggcaaagcccgggcgtcgggcgacctttggtcgcccggcctcagtgagcgagcgagcgcgcagagagggagtggccaactccatcactaggggttcct

SEQ ID NO: 179 - DNA, 145 bp, Artificial Sequence
  Description of Artificial Sequence: Synthetic polynucleotide
aggaacccctagtgatggagttggccactccctctctgcgcgctcgctcgctcactgaggccgggcgaccaaaggtcgcccgacgcccgggctttgcccgggcggcctcagtgagcgagcgagcgcgcagagagggagtggccaa

SEQ ID NO: 180 - DNA, 53 bp, Artificial Sequence
  Description of Artificial Sequence: Synthetic oligonucleotide
ctcctgggcaacgtgctggtctgtgtgctggcccatcactttggcaaagaatt

SEQ ID NO: 181 - DNA, 3428 bp, Artificial Sequence
  Description of Artificial Sequence: Synthetic polynucleotide
ttggccactccctctctgcgcgctcgctcgctcactgaggccgcccgggcaaagcccgggcgtcgggcgacctttggtcgcccggcctcagtgagcgagcgagcgcgcagagagggagtggccaactccatcactaggggttccttgcgcacaggtacccccctgcccccacagctcctctcctgtgccttgtttcccagccatgcgttctcctctataaatacccgctctggtatttggggttggcagctgttgctgccagggagatggttgggttgacatgcggctcctgacaaaacacaaacccctggtgtgtgtgggcgtgggtggtgtgagtagggggatgaatcagggagggggcgggggacccagggggcaggagccacacaaagtctgtgcgggggtgggagcgcacatagcaattggaaactggctgcagacatgcttgctgcctgccctggcgaaggattggtaggcttgccgtcacaggacccccgctggctgactcaggggcgcaggctcttgcgggggagctggcctcccgcccccacggccacgggccctttcctggcaggacagcgggatcttgcagctgtcaggggaggggaggcgggggctgatgtcaggagggatacaaatagtgccgacggctgggggccctgtctcccctcgccgcatccactctccggccggccgcctgcccgccgcctcctccgtgcgcccgccagcctcgcccgcgccgtcaccgatatctcagatcgcctggagacgccatccacgctgttttgacctccatagaagacaccgggaccgatccagcctccgcggattcgaatcccggccgggaacggtgcattggaacgcggattccccgtgccaagagtgacgtaagtaccgcctatagagtctataggcccacaaaaaatgctttcttcttttaatatacttttttgtttatcttatttctaatactttccctaatctctttctttcagggcaataatgatacaatgtatcatgcctctttgcaccattctaaagaataacagtgataatttctgggttaaggcaatagcaatatttctgcatataaatatttctgcatataaattgtaactgatgtaagaggtttcatattgctaatagcagctacaatccagctaccattctgcttttattttatggttgggataaggctggattattctgagtccaagctaggcccttttgctaatcatgttcatacctcttatcttcctcccacagctcctgggcaacgtgctggtctgtgtgctggcccatcactttggcaaagaatttgagcggccgccaccatggcatcagcaagcacaagcaaatacaactcacatagcctggaaaacgagagcatcaagagaacctcaagggacggggtcaatagagatctgacagaggcagtgccaaggctgcctggagagacactgatcacagacaaggaagtgatctacatctgccctttcaacggcccaatcaagggccgcgtgtatatcaccaattacagactgtacctgcggagcctggagacagatagctccctgatcctggacgtgcctctgggcgtgatcagcagaatcgagaagatgggaggagccacctctaggggagagaacagctacggcctggatatcacctgtaaggacatgcgcaatctgcggtttgccctgaagcaggagggccactcccggagagatatgttcgagatcctgaccagatatgcctttcccctggcccactctctgcctctgttcgcctttctgaacgaggagaagttcaatgtggacggctggacagtgtacaaccccgtggaggagtataggcgccagggcctgcctaaccaccactggcggatcacctttatcaataagtgctacgagctgtgcgatacatatccagccctgctggtggtgccctacagagccagcgacgatgacctgcggagagtggccaccttccggagccggaacagaatccctgtgctgagctggatccacccagagaataagacagtgatcgtgcgctgctcccagccactggtgggaatgtctggcaagcggaacaaggatgacgagaagtacctggatgtgatcagagagacaaataagcagatcagcaagctgacaatctatgatgcccggccttctgtgaatgcagtggcaaataaggcaacaggaggaggatatgagtctgatgacgcctatcacaacgccgagctgttctttctggatatccacaatatccacgtgatgagagagtccctgaagaaggtgaaggacatcgtgtacccaaacgtggaggagtcccactggctgtctagcctggagtctacccactggctggagcacatcaagctggtgctgacaggcgccatccaggtggccgataaggtgtcctctggcaagagctccgtgctggtgcactgttccgatgggtgggacagaacagcacagctgacaagcctggctatgctgatgctggactccttctatagatctatcgagggctttgagatcctggtgcagaaggagtggatcagcttcggccacaagtttgcctccaggatcggccacggcgataagaatcacaccgatgccgaccgcagccctatcttcctgcagtttatcgactgcgtgtggcagatgtccaagcagttcccaaccgccttcgagtttaacgagcagtttctgatcatcatcctggaccacctgtactcctgcaggttcggcacattcctgtttaattgtgagtctgccagagagaggcagaaggtgaccgagcgcacagtgtctctgtggagcctgatcaacagcaataaggagaagttcaagaaccccttctacacaaaggagatcaatcgcgtgctgtatcctgtggcatccatgagacacctggagctgtgggtgaactactatatccgctggaatccccggatcaagcagcagcagcccaaccctgtggagcagcggtacatggagctgctggccctgagagatgagtatatcaagaggctggaggagctgcagctggccaatagcgccaagctgtccgacccacctacttcaccaagcagcccctcacagatgatgccccacgtccagacccacttttaattaagatctttttccctctgccaaaaattatggggacatcatgaagccccttgagcatctgacttctggctaataaaggaaatttattttcattgcaatagtgtgttggaattttttgtgtctctcactcgaggcctaggaacccctagtgatggagttggccactccctctctgcgcgctcgctcgctcactgaggccgggcgaccaaaggtcgcccgacgcccgggctttgcccgggcggcctcagtgagcgagcgagcgcgcagagagggagtggccaa

SEQ ID NO: 182 - DNA, 3499 bp, Artificial Sequence
  Description of Artificial Sequence: Synthetic polynucleotide
ttggccactccctctctgcgcgctcgctcgctcactgaggccgcccgggcaaagcccgggcgtcgggcgacctttggtcgcccggcctcagtgagcgagcgagcgcgcagagagggagtggccaactccatcactaggggttccttgcgcacaggtaccgacattgattattgactagttattaatagtaatcaattacggggtcattagttcatagcccatatatggagttccgcgttacataacttacggtaaatggcccgcctggctgaccgcccaacgacccccgcccattgacgtcaataatgacgtatgttcccatagtaacgccaatagggactttccattgacgtcaatgggtggagtatttacggtaaactgcccacttggcagtacatcaagtgtatcatatgccaagtacgccccctattgacgtcaatgacggtaaatggcccgcctggcattatgcccagtacatgaccttatgggactttcctacttggcagtacatctacgtattagtcatcgctattaccatggtcgaggtgagccccacgttctgcttcactctccccatctcccccccctccccacccccaattttgtatttatttattttttaattattttgtgcagcgatgggggcggggggggggggggggcgcgcgccaggcggggcggggcggggcgaggggcggggcggggcgaggcggagaggtgcggcggcagccaatcagagcggcgcgctccgaaagtttccttttatggcgaggcggcggcggcggcggccctataaaaagcgaagcgcgcggcgggcggatatctcagatcgcctggagacgccatccacgctgttttgacctccatagaagacaccgggaccgatccagcctccgcggattcgaatcccggccgggaacggtgcattggaacgcggattccccgtgccaagagtgacgtaagtaccgcctatagagtctataggcccacaaaaaatgctttcttcttttaatatacttttttgtttatcttatttctaatactttccctaatctctttctttcagggcaataatgatacaatgtatcatgcctctttgcaccattctaaagaataacagtgataatttctgggttaaggcaatagcaatatttctgcatataaatatttctgcatataaattgtaactgatgtaagaggtttcatattgctaatagcagctacaatccagctaccattctgcttttattttatggttgggataaggctggattattctgagtccaagctaggcccttttgctaatcatgttcatacctcttatcttcctcccacagctcctgggcaacgtgctggtctgtgtgctggcccatcactttggcaaagaatttgagcggccgccaccatggctagcgccagcacaagcaagtacaacagccacagcctggaaaacgagagcatcaagcggaccagcagagatggcgtgaacagggatctgacagaggccgtgcctagactgcctggcgagacactgatcaccgacaaagaagtgatctacatctgccccttcaacggccccatcaagggccgcgtgtacatcaccaactaccggctgtacctgcggtccctggaaaccgatagcagcctgatcctggatgtgcccctgggcgtgatcagccggattgagaaaatgggcggagccacctccagaggcgagaatagctacggcctggacatcacatgcaaggacatgcggaacctgagattcgccctgaagcaagagggccacagcagacgggacatgttcgagatcctgaccagatacgcctttcctctggctcactccctgcctctgttcgccttcctgaacgaagagaagttcaacgtggacggctggaccgtgtacaaccccgtggaagagtatcggagacagggcctgcctaatcaccactggcggatcaccttcatcaacaagtgctacgagctgtgcgacacataccccgcactgctggtggtgccttacagagcctccgacgacgacctgagaagagtggccacctttcggagccggaacagaatccctgtgctgagctggattcaccccgagaacaagaccgtgatcgtgcggtgttctcagcccctcgtgggcatgtctggcaagagaaacaaggacgacgagaagtacctggacgtgatccgcgagacaaacaagcagatcagcaagctgaccatctacgacgccagacctagcgtgaacgccgtggccaacaaagctacaggcggcggatacgagagcgacgacgcctatcataacgccgagctgttctttctggacatccacaacatccacgtgatgcgggaaagcctgaagaaagtgaaggacatcgtgtaccccaatgtggaagagagccactggctgagcagtctggaaagcacacactggctggaacacatcaagctggtgctgacaggcgccatccaggtggccgataaggtgtcctctggcaagtctagcgtgctggtgcactgtagcgacggctgggatagaacagcccagctgacatctctggccatgctgatgctggacagcttctacagatccatcgagggctttgagatcctggtgcagaaagagtggatcagcttcggccacaagttcgccagcagaatcggacacggcgacaagaaccacaccgacgccgatagaagccccatcttcctgcagttcatcgactgcgtgtggcagatgtccaagcagttccctaccgccttcgagttcaacgagcagttcctgatcatcatcctggaccacctgtacagctgcagattcggcaccttcctgttcaactgcgagagcgccagagaacggcagaaagtgaccgagcggaccgtgtctctgtggtccctgatcaacagcaacaaagagaaattcaagaaccccttctacaccaaagaaatcaaccgggtgctgtaccccgtggccagcatgagacatctggaactgtgggtcaactactacatccggtggaaccccagaatcaagcagcagcagcccaatcctgtggaacagcggtacatggaactgctggccctgcgggacgagtacatcaagagactggaagaactgcagctggccaacagcgccaagctgagcgatcctcctacaagccctagcagccccagccagatgatgcctcacgtgcagacccacttttaattaagatctttttccctctgccaaaaattatggggacatcatgaagccccttgagcatctgacttctggctaataaaggaaatttattttcattgcaatagtgtgttggaattttttgtgtctctcactcgaggcctaggaacccctagtgatggagttggccactccctctctgcgcgctcgctcgctcactgaggccgggcgaccaaaggtcgcccgacgcccgggctttgcccgggcggcctcagtgagcgagcgagcgcgcagagagggagtggccaa

SEQ ID NO: 183 - DNA, 3428 bp, Artificial Sequence
  Description of Artificial Sequence: Synthetic polynucleotide
ttggccactccctctctgcgcgctcgctcgctcactgaggccgcccgggcaaagcccgggcgtcgggcgacctttggtcgcccggcctcagtgagcgagcgagcgcgcagagagggagtggccaactccatcactaggggttccttgcgcacaggtacccccctgcccccacagctcctctcctgtgccttgtttcccagccatgcgttctcctctataaatacccgctctggtatttggggttggcagctgttgctgccagggagatggttgggttgacatgcggctcctgacaaaacacaaacccctggtgtgtgtgggcgtgggtggtgtgagtagggggatgaatcagggagggggcgggggacccagggggcaggagccacacaaagtctgtgcgggggtgggagcgcacatagcaattggaaactggctgcagacatgcttgctgcctgccctggcgaaggattggtaggcttgccgtcacaggacccccgctggctgactcaggggcgcaggctcttgcgggggagctggcctcccgcccccacggccacgggccctttcctggcaggacagcgggatcttgcagctgtcaggggaggggaggcgggggctgatgtcaggagggatacaaatagtgccgacggctgggggccctgtctcccctcgccgcatccactctccggccggccgcctgcccgccgcctcctccgtgcgcccgccagcctcgcccgcgccgtcaccgatatctcagatcgcctggagacgccatccacgctgttttgacctccatagaagacaccgggaccgatccagcctccgcggattcgaatcccggccgggaacggtgcattggaacgcggattccccgtgccaagagtgacgtaagtaccgcctatagagtctataggcccacaaaaaatgctttcttcttttaatatacttttttgtttatcttatttctaatactttccctaatctctttctttcagggcaataatgatacaatgtatcatgcctctttgcaccattctaaagaataacagtgataatttctgggttaaggcaatagcaatatttctgcatataaatatttctgcatataaattgtaactgatgtaagaggtttcatattgctaatagcagctacaatccagctaccattctgcttttattttatggttgggataaggctggattattctgagtccaagctaggcccttttgctaatcatgttcatacctcttatcttcctcccacagctcctgggcaacgtgctggtctgtgtgctggcccatcactttggcaaagaatttgagcggccgccaccatggcttctgcatcaacttctaaatataattcacactccttggagaatgagtctattaagaggacgtctcgagatggagtcaatcgagatctcactgaggctgttcctcgacttccaggagaaacactaatcactgacaaagaagttatttacatatgtcctttcaatggccccattaagggaagagtttacatcacaaattatcgtctttatttaagaagtttggaaacggattcttctctaatacttgatgttcctctgggtgtgatctcgagaattgaaaaaatgggaggcgcgacaagtagaggagaaaattcctatggtctagatattacttgtaaagacatgagaaacctgaggttcgctttgaaacaggaaggccacagcagaagagatatgtttgagatcctcacgagatacgcgtttcccctggctcacagtctgccattatttgcatttttaaatgaagaaaagtttaacgtggatggatggacagtttacaatccagtggaagaatacaggaggcagggcttgcccaatcaccattggagaataacttttattaataagtgctatgagctctgtgacacttaccctgctcttttggtggttccgtatcgtgcctcagatgatgacctccggagagttgcaacttttaggtcccgaaatcgaattccagtgctgtcatggattcatccagaaaataagacggtcattgtgcgttgcagtcagcctcttgtcggtatgagtgggaaacgaaataaagatgatgagaaatatctcgatgttatcagggagactaataaacaaatttctaaactcaccatttatgatgcaagacccagcgtaaatgcagtggccaacaaggcaacaggaggaggatatgaaagtgatgatgcatatcataacgccgaacttttcttcttagacattcataatattcatgttatgcgggaatctttaaaaaaagtgaaggacattgtttatcctaatgtagaagaatctcattggttgtccagtttggagtctactcattggttagaacatatcaagctcgttttgacaggagccattcaagtagcagacaaagtttcttcagggaagagttcagtgcttgtgcattgcagtgacggatgggacaggactgctcagctgacatccttggccatgctgatgttggatagcttctataggagcattgaagggttcgaaatactggtacaaaaagaatggataagttttggacataaatttgcatctcgaataggtcatggtgataaaaaccacaccgatgctgaccgttctcctatttttctccagtttattgattgtgtgtggcaaatgtcaaaacagttccctacagcttttgaattcaatgaacaatttttgattataattttggatcatctgtatagttgccgatttggtactttcttattcaactgtgaatctgctcgagaaagacagaaggttacagaaaggactgtttctttatggtcactgataaacagtaataaagaaaaattcaaaaacccattctatactaaagaaatcaatagagttttatatccagttgcaagtatgcgtcacttggaactctgggtgaattactacattagatggaaccccaggatcaaacaacaacaaccaaatccagtggaacaacgttacatggaactcttagccttacgagatgaatacataaaacggcttgaggaactgcaactagcaaactctgcaaaactttctgatcccccaacttcaccttccagtccttctcaaatgatgccacatgtgcaaactcacttttaattaagatctttttccctctgccaaaaattatggggacatcatgaagccccttgagcatctgacttctggctaataaaggaaatttattttcattgcaatagtgtgttggaattttttgtgtctctcactcgaggcctaggaacccctagtgatggagttggccactccctctctgcgcgctcgctcgctcactgaggccgggcgaccaaaggtcgcccgacgcccgggctttgcccgggcggcctcagtgagcgagcgagcgcgcagagagggagtggccaa

SEQ ID NO: 184 - DNA, 3428 bp, Artificial Sequence
  Description of Artificial Sequence: Synthetic polynucleotide
ttggccactccctctctgcgcgctcgctcgctcactgaggccgcccgggcaaagcccgggcgtcgggcgacctttggtcgcccggcctcagtgagcgagcgagcgcgcagagagggagtggccaactccatcactaggggttccttgcgcacaggtacccccctgcccccacagctcctctcctgtgccttgtttcccagccatgcgttctcctctataaatacccgctctggtatttggggttggcagctgttgctgccagggagatggttgggttgacatgcggctcctgacaaaacacaaacccctggtgtgtgtgggcgtgggtggtgtgagtagggggatgaatcagggagggggcgggggacccagggggcaggagccacacaaagtctgtgcgggggtgggagcgcacatagcaattggaaactggctgcagacatgcttgctgcctgccctggcgaaggattggtaggcttgccgtcacaggacccccgctggctgactcaggggcgcaggctcttgcgggggagctggcctcccgcccccacggccacgggccctttcctggcaggacagcgggatcttgcagctgtcaggggaggggaggcgggggctgatgtcaggagggatacaaatagtgccgacggctgggggccctgtctcccctcgccgcatccactctccggccggccgcctgcccgccgcctcctccgtgcgcccgccagcctcgcccgcgccgtcaccgatatctcagatcgcctggagacgccatccacgctgttttgacctccatagaagacaccgggaccgatccagcctccgcggattcgaatcccggccgggaacggtgcattggaacgcggattccccgtgccaagagtgacgtaagtaccgcctatagagtctataggcccacaaaaaatgctttcttcttttaatatacttttttgtttatcttatttctaatactttccctaatctctttctttcagggcaataatgatacaatgtatcatgcctctttgcaccattctaaagaataacagtgataatttctgggttaaggcaatagcaatatttctgcatataaatatttctgcatataaattgtaactgatgtaagaggtttcatattgctaatagcagctacaatccagctaccattctgcttttattttatggttgggataaggctggattattctgagtccaagctaggcccttttgctaatcatgttcatacctcttatcttcctcccacagctcctgggcaacgtgctggtctgtgtgctggcccatcactttggcaaagaatttgagcggccgccaccatggcttctgcatcaacttctaaatataattcacactccttggagaatgagtctattaagaggacgtctcgagatggagtcaatcgagatctcactgaggctgttcctcgacttccaggagaaacactaatcactgacaaagaagttatttacatatgtcctttcaatggccccattaagggaagagtttacatcacaaattatcgtctttatttaagaagtttggaaacggattcttctctaatacttgatgttcctctgggtgtgatctcgagaattgaaaaaatgggaggcgcgacaagtagaggagaaaattcctatggtctagatattacttgtaaagacatgagaaacctgaggttcgctttgaaacaggaaggccacagcagaagagatatgtttgagatcctcacgagatacgcgtttcccctggctcacagtctgccattatttgcatttttaaatgaagaaaagtttaacgtggatggatggacagtttacaatccagtggaagaatacaggaggcagggcttgcccaatcaccattggagaataacttttattaataagtgctatgagctctgtgacacttaccctgctcttttggtggttccgtatcgtgcctcagatgatgacctccggagagttgcaacttttaggtcccgaaatcgaattccagtgctgtcatggattcatccagaaaataagacggtcattgtgcgttgcagtcagcctcttgtcggtatgagtgggaaacgaaataaagatgatgagaaatatctcgatgttatcagggagactaataaacaaatttctaaactcaccatttatgatgcaagacccagcgtaaatgcagtggccaacaaggcaacaggaggaggatatgaaagtgatgatgcatatcataacgccgaacttttcttcttagacattcataatattcatgttatgcgggaatctttaaaaaaagtgaaggacattgtttatcctaatgtagaagaatctcattggttgtccagtttggagtctactcattggttagaacatatcaagctcgttttgacaggagccattcaagtagcagacaaagtttcttcagggaagagttcagtgcttgtgcattgcagtgacggatgggacaggactgctcagctgacatccttggccatgctgatgttggatagcttctataggagcattgaagggttcgaaatactggtacaaaaagaatggataagttttggacataaatttgcatctcgaataggtcatggtgataaaaaccacaccgatgctgaccgttctcctatttttctccagtttattgattgtgtgtggcaaatgtcaaaacagttccctacagcttttgaattcaatgaacaatttttgattataattttggatcatctgtatagttgccgatttggtactttcttattcaactgtgaatctgctcgagaaagacagaaggttacagaaaggactgtttctttatggtcactgataaacagtaataaagaaaaattcaaaaaccccttctatactaaagaaatcaatcgagttttatatccagttgccagtatgcgtcacttggaactctgggtgaattactacattagatggaaccccaggatcaagcaacaacagccgaatccagtggagcagcgttacatggagctcttagccttacgcgacgaatacataaagcggcttgaggaactgcagctcgccaactctgccaagctttctgatcccccaacttcaccttccagtccttcgcaaatgatgccccatgtgcaaactcacttttaattaagatctttttccctctgccaaaaattatggggacatcatgaagccccttgagcatctgacttctggctaataaaggaaatttattttcattgcaatagtgtgttggaattttttgtgtctctcactcgaggcctaggaacccctagtgatggagttggccactccctctctgcgcgctcgctcgctcactgaggccgggcgaccaaaggtcgcccgacgcccgggctttgcccgggcggcctcagtgagcgagcgagcgcgcagagagggagtggccaa

SEQ ID NO: 185 - DNA, 3428 bp, Artificial Sequence
  Description of Artificial Sequence: Synthetic polynucleotide
ttggccactccctctctgcgcgctcgctcgctcactgaggccgcccgggcaaagcccgggcgtcgggcgacctttggtcgcccggcctcagtgagcgagcgagcgcgcagagagggagtggccaactccatcactaggggttccttgcgcacaggtacccccctgcccccacagctcctctcctgtgccttgtttcccagccatgcgttctcctctataaatacccgctctggtatttggggttggcagctgttgctgccagggagatggttgggttgacatgcggctcctgacaaaacacaaacccctggtgtgtgtgggcgtgggtggtgtgagtagggggatgaatcagggagggggcgggggacccagggggcaggagccacacaaagtctgtgcgggggtgggagcgcacatagcaattggaaactggctgcagacatgcttgctgcctgccctggcgaaggattggtaggcttgccgtcacaggacccccgctggctgactcaggggcgcaggctcttgcgggggagctggcctcccgcccccacggccacgggccctttcctggcaggacagcgggatcttgcagctgtcaggggaggggaggcgggggctgatgtcaggagggatacaaatagtgccgacggctgggggccctgtctcccctcgccgcatccactctccggccggccgcctgcccgccgcctcctccgtgcgcccgccagcctcgcccgcgccgtcaccgatatctcagatcgcctggagacgccatccacgctgttttgacctccatagaagacaccgggaccgatccagcctccgcggattcgaatcccggccgggaacggtgcattggaacgcggattccccgtgccaagagtgacgtaagtaccgcctatagagtctataggcccacaaaaaatgctttcttcttttaatatacttttttgtttatcttatttctaatactttccctaatctctttctttcagggcaataatgatacaatgtatcatgcctctttgcaccattctaaagaataacagtgataatttctgggttaaggcaatagcaatatttctgcatataaatatttctgcatataaattgtaactgatgtaagaggtttcatattgctaatagcagctacaatccagctaccattctgcttttattttatggttgggataaggctggattattctgagtccaagctaggcccttttgctaatcatgttcatacctcttatcttcctcccacagctcctgggcaacgtgctggtctgtgtgctggcccatcactttggcaaagaatttgagcggccgccaccatggcctctgccagcacctctaagtacaacagccactccctggaaaatgaatccatcaaaaggaccagcagagatggagtgaacagagacctaactgaagctgtgccaagactgcctggagagaccctgatcacagacaaggaagtgatctacatctgccccttcaatggccctatcaagggaagggtgtacatcaccaactacaggctttacctgagatccctggagacagacagcagcctgatcctggatgtgcctctgggagtgatcagcagaatagagaagatggggggtgccaccagcagaggagagaacagctatggcctggacatcacctgcaaggacatgagaaacctgagatttgccctgaagcaggagggccacagcagaagagacatgtttgaaatcctgaccaggtatgccttccccctggcccactctctccccctgtttgccttcctgaatgaggaaaagttcaatgttgatggctggacagtgtacaacccagtggaggagtacagaagacagggcctgcctaaccaccactggaggatcaccttcatcaacaagtgctatgaactgtgtgacacataccctgccctgctggtggtgccttacagagcctcagatgatgacctgagaagagttgccaccttcagaagcaggaacagaatccctgtactgagctggatccaccctgagaataagactgtgattgtgaggtgcagccagcccctggtgggcatgagtggcaagagaaacaaagatgatgaaaagtacctggatgtgatcagagagaccaacaaacagatcagcaagctcaccatctatgatgctagaccctctgttaatgctgtggccaacaaggccacagggggaggctatgaatctgatgatgcttaccacaatgctgagctgttcttcctggacatccacaacatccatgtgatgagagaatccctcaagaaagtgaaggacattgtgtaccctaatgtggaagaaagtcactggctgagcagcttggagtccacccactggctggagcacatcaagctggtcctgacaggagccatccaggtggctgacaaggtgagttctggcaagtcctcagtgctggtccactgctctgatggctgggacagaactgcccagctgaccagtctggccatgctgatgctggactccttctacagaagcattgaaggctttgaaatcctggtgcaaaaggaatggatctcttttggccacaagtttgccagcagaattggccatggtgacaaaaaccacacagatgctgacagaagccctatcttcctgcagttcattgactgtgtgtggcagatgagcaagcagttccccacagcatttgagttcaatgagcagttcctaataatcatcctggaccacctctacagctgcagatttggcaccttcctgttcaactgtgagtctgccagagaaagacagaaggtgacagagaggacagtgagcctgtggagcctgatcaactccaacaaggagaagttcaagaaccccttctacaccaaggaaatcaacagggtgctgtaccctgtggctagcatgaggcacctggagctgtgggtcaactactacatcagatggaaccctagaatcaaacagcaacaacccaaccctgtggagcagaggtacatggagttactggccctgagggatgagtacatcaagagactggaggagctgcagctggccaactctgccaaactgtctgaccctcctacctcccccagctccccctctcagatgatgccacatgtgcagacccacttttaattaagatctttttccctctgccaaaaattatggggacatcatgaagccccttgagcatctgacttctggctaataaaggaaatttattttcattgcaatagtgtgttggaattttttgtgtctctcactcgaggcctaggaacccctagtgatggagttggccactccctctctgcgcgctcgctcgctcactgaggccgggcgaccaaaggtcgcccgacgcccgggctttgcccgggcggcctcagtgagcgagcgagcgcgcagagagggagtggccaa

SEQ ID NO: 186 - DNA, 3499 bp, Artificial Sequence
  Description of Artificial Sequence: Synthetic polynucleotide
ttggccactccctctctgcgcgctcgctcgctcactgaggccgcccgggcaaagcccgggcgtcgggcgacctttggtcgcccggcctcagtgagcgagcgagcgcgcagagagggagtggccaactccatcactaggggttccttgcgcacaggtaccgacattgattattgactagttattaatagtaatcaattacggggtcattagttcatagcccatatatggagttccgcgttacataacttacggtaaatggcccgcctggctgaccgcccaacgacccccgcccattgacgtcaataatgacgtatgttcccatagtaacgccaatagggactttccattgacgtcaatgggtggagtatttacggtaaactgcccacttggcagtacatcaagtgtatcatatgccaagtacgccccctattgacgtcaatgacggtaaatggcccgcctggcattatgcccagtacatgaccttatgggactttcctacttggcagtacatctacgtattagtcatcgctattaccatggtcgaggtgagccccacgttctgcttcactctccccatctcccccccctccccacccccaattttgtatttatttattttttaattattttgtgcagcgatgggggcggggggggggggggggcgcgcgccaggcggggcggggcggggcgaggggcggggcggggcgaggcggagaggtgcggcggcagccaatcagagcggcgcgctccgaaagtttccttttatggcgaggcggcggcggcggcggccctataaaaagcgaagcgcgcggcgggcggatatctcagatcgcctggagacgccatccacgctgttttgacctccatagaagacaccgggaccgatccagcctccgcggattcgaatcccggccgggaacggtgcattggaacgcggattccccgtgccaagagtgacgtaagtaccgcctatagagtctataggcccacaaaaaatgctttcttcttttaatatacttttttgtttatcttatttctaatactttccctaatctctttctttcagggcaataatgatacaatgtatcatgcctctttgcaccattctaaagaataacagtgataatttctgggttaaggcaatagcaatatttctgcatataaatatttctgcatataaattgtaactgatgtaagaggtttcatattgctaatagcagctacaatccagctaccattctgcttttattttatggttgggataaggctggattattctgagtccaagctaggcccttttgctaatcatgttcatacctcttatcttcctcccacagctcctgggcaacgtgctggtctgtgtgctggcccatcactttggcaaagaatttgagcggccgccaccatggcatcagcaagcacaagcaaatacaactcacatagcctggaaaacgagagcatcaagagaacctcaagggacggggtcaatagagatctgacagaggcagtgccaaggctgcctggagagacactgatcacagacaaggaagtgatctacatctgccctttcaacggcccaatcaagggccgcgtgtatatcaccaattacagactgtacctgcggagcctggagacagatagctccctgatcctggacgtgcctctgggcgtgatcagcagaatcgagaagatgggaggagccacctctaggggagagaacagctacggcctggatatcacctgtaaggacatgcgcaatctgcggtttgccctgaagcaggagggccactcccggagagatatgttcgagatcctgaccagatatgcctttcccctggcccactctctgcctctgttcgcctttctgaacgaggagaagttcaatgtggacggctggacagtgtacaaccccgtggaggagtataggcgccagggcctgcctaaccaccactggcggatcacctttatcaataagtgctacgagctgtgcgatacatatccagccctgctggtggtgccctacagagccagcgacgatgacctgcggagagtggccaccttccggagccggaacagaatccctgtgctgagctggatccacccagagaataagacagtgatcgtgcgctgctcccagccactggtgggaatgtctggcaagcggaacaaggatgacgagaagtacctggatgtgatcagagagacaaataagcagatcagcaagctgacaatctatgatgcccggccttctgtgaatgcagtggcaaataaggcaacaggaggaggatatgagtctgatgacgcctatcacaacgccgagctgttctttctggatatccacaatatccacgtgatgagagagtccctgaagaaggtgaaggacatcgtgtacccaaacgtggaggagtcccactggctgtctagcctggagtctacccactggctggagcacatcaagctggtgctgacaggcgccatccaggtggccgataaggtgtcctctggcaagagctccgtgctggtgcactgttccgatgggtgggacagaacagcacagctgacaagcctggctatgctgatgctggactccttctatagatctatcgagggctttgagatcctggtgcagaaggagtggatcagcttcggccacaagtttgcctccaggatcggccacggcgataagaatcacaccgatgccgaccgcagccctatcttcctgcagtttatcgactgcgtgtggcagatgtccaagcagttcccaaccgccttcgagtttaacgagcagtttctgatcatcatcctggaccacctgtactcctgcaggttcggcacattcctgtttaattgtgagtctgccagagagaggcagaaggtgaccgagcgcacagtgtctctgtggagcctgatcaacagcaataaggagaagttcaagaaccccttctacacaaaggagatcaatcgcgtgctgtatcctgtggcatccatgagacacctggagctgtgggtgaactactatatccgctggaatccccggatcaagcagcagcagcccaaccctgtggagcagcggtacatggagctgctggccctgagagatgagtatatcaagaggctggaggagctgcagctggccaatagcgccaagctgtccgacccacctacttcaccaagcagcccctcacagatgatgccccacgtccagacccacttttaattaagatctttttccctctgccaaaaattatggggacatcatgaagccccttgagcatctgacttctggctaataaaggaaatttattttcattgcaatagtgtgttggaattttttgtgtctctcactcgaggcctaggaacccctagtgatggagttggccactccctctctgcgcgctcgctcgctcactgaggccgggcgaccaaaggtcgcccgacgcccgggctttgcccgggcggcctcagtgagcgagcgagcgcgcagagagggagtggccaa

SEQ ID NO: 187 - DNA, 3499 bp, Artificial Sequence; identical to SEQ ID NO: 182
  Description of Artificial Sequence: Synthetic polynucleotide

SEQ ID NO: 188 - DNA, 3499 bp, Artificial Sequence
  Description of Artificial Sequence: Synthetic polynucleotide
ttggccactccctctctgcgcgctcgctcgctcactgaggccgcccgggcaaagcccgggcgtcgggcgacctttggtcgcccggcctcagtgagcgagcgagcgcgcagagagggagtggccaactccatcactaggggttccttgcgcacaggtaccgacattgattattgactagttattaatagtaatcaattacggggtcattagttcatagcccatatatggagttccgcgttacataacttacggtaaatggcccgcctggctgaccgcccaacgacccccgcccattgacgtcaataatgacgtatgttcccatagtaacgccaatagggactttccattgacgtcaatgggtggagtatttacggtaaactgcccacttggcagtacatcaagtgtatcatatgccaagtacgccccctattgacgtcaatgacggtaaatggcccgcctggcattatgcccagtacatgaccttatgggactttcctacttggcagtacatctacgtattagtcatcgctattaccatggtcgaggtgagccccacgttctgcttcactctccccatctcccccccctccccacccccaattttgtatttatttattttttaattattttgtgcagcgatgggggcggggggggggggggggcgcgcgccaggcggggcggggcggggcgaggggcggggcggggcgaggcggagaggtgcggcggcagccaatcagagcggcgcgctccgaaagtttccttttatggcgaggcggcggcggcggcggccctataaaaagcgaagcgcgcggcgggcggatatctcagatcgcctggagacgccatccacgctgttttgacctccatagaagacaccgggaccgatccagcctccgcggattcgaatcccggccgggaacggtgcattggaacgcggattccccgtgccaagagtgacgtaagtaccgcctatagagtctataggcccacaaaaaatgctttcttcttttaatatacttttttgtttatcttatttctaatactttccctaatctctttctttcagggcaataatgatacaatgtatcatgcctctttgcaccattctaaagaataacagtgataatttctgggttaaggcaatagcaatatttctgcatataaatatttctgcatataaattgtaactgatgtaagaggtttcatattgctaatagcagctacaatccagctaccattctgcttttattttatggttgggataaggctggattattctgagtccaagctaggcccttttgctaatcatgttcatacctcttatcttcctcccacagctcctgggcaacgtgctggtctgtgtgctggcccatcactttggcaaagaatttgagcggccgccaccatggcttctgcatcaacttctaaatataattcacactccttggagaatgagtctattaagaggacgtctcgagatggagtcaatcgagatctcactgaggctgttcctcgacttccaggagaaacactaatcactgacaaagaagttatttacatatgtcctttcaatggccccattaagggaagagtttacatcacaaattatcgtctttatttaagaagtttggaaacggattcttctctaatacttgatgttcctctgggtgtgatctcgagaattgaaaaaatgggaggcgcgacaagtagaggagaaaattcctatggtctagatattacttgtaaagacatgagaaacctgaggttcgctttgaaacaggaaggccacagcagaagagatatgtttgagatcctcacgagatacgcgtttcccctggctcacagtctgccattatttgcatttttaaatgaagaaaagtttaacgtggatggatggacagtttacaatccagtggaagaatacaggaggcagggcttgcccaatcaccattggagaataacttttattaataagtgctatgagctctgtgacacttaccctgctcttttggtggttccgtatcgtgcctcagatgatgacctccggagagttgcaacttttaggtcccgaaatcgaattccagtgctgtcatggattcatccagaaaataagacggtcattgtgcgttgcagtcagcctcttgtcggtatgagtgggaaacgaaataaagatgatgagaaatatctcgatgttatcagggagactaataaacaaatttctaaactcaccatttatgatgcaagacccagcgtaaatgcagtggccaacaaggcaacaggaggaggatatgaaagtgatgatgcatatcataacgccgaacttttcttcttagacattcataatattcatgttatgcgggaatctttaaaaaaagtgaaggacattgtttatcctaatgtagaagaatctcattggttgtccagtttggagtctactcattggttagaacatatcaagctcgttttgacaggagccattcaagtagcagacaaagtttcttcagggaagagttcagtgcttgtgcattgcagtgacggatgggacaggactgctcagctgacatccttggccatgctgatgttggatagcttctataggagcattgaagggttcgaaatactggtacaaaaagaatggataagttttggacataaatttgcatctcgaataggtcatggtgataaaaaccacaccgatgctgaccgttctcctatttttctccagtttattgattgtgtgtggcaaatgtcaaaacagttccctacagcttttgaattcaatgaacaatttttgattataattttggatcatctgtatagttgccgatttggtactttcttattcaactgtgaatctgctcgagaaagacagaaggttacagaaaggactgtttctttatggtcactgataaacagtaataaagaaaaattcaaaaacccattctatactaaagaaatcaatagagttttatatccagttgcaagtatgcgtcacttggaactctgggtgaattactacattagatggaaccccaggatcaaacaacaacaaccaaatccagtggaacaacgttacatggaactcttagccttacgagatgaatacataaaacggcttgaggaactgcaactagcaaactctgcaaaactttctgatcccccaacttcaccttccagtccttctcaaatgatgccacatgtgcaaactcacttttaattaagatctttttccctctgccaaaaattatggggacatcatgaagccccttgagcatctgacttctggctaataaaggaaatttattttcattgcaatagtgtgttggaattttttgtgtctctcactcgaggcctaggaacccctagtgatggagttggccactccctctctgcgcgctcgctcgctcactgaggccgggcgaccaaaggtcgcccgacgcccgggctttgcccgggcggcctcagtgagcgagcgagcgcgcagagagggagtggccaa

SEQ ID NO: 189 - DNA, 3499 bp, Artificial Sequence
  Description of Artificial Sequence: Synthetic polynucleotide
ttggccactccctctctgcgcgctcgctcgctcactgaggccgcccgggcaaagcccgggcgtcgggcgacctttggtcgcccggcctcagtgagcgagcgagcgcgcagagagggagtggccaactccatcactaggggttccttgcgcacaggtaccgacattgattattgactagttattaatagtaatcaattacggggtcattagttcatagcccatatatggagttccgcgttacataacttacggtaaatggcccgcctggctgaccgcccaacgacccccgcccattgacgtcaataatgacgtatgttcccatagtaacgccaatagggactttccattgacgtcaatgggtggagtatttacggtaaactgcccacttggcagtacatcaagtgtatcatatgccaagtacgccccctattgacgtcaatgacggtaaatggcccgcctggcattatgcccagtacatgaccttatgggactttcctacttggcagtacatctacgtattagtcatcgctattaccatggtcgaggtgagccccacgttctgcttcactctccccatctcccccccctccccacccccaattttgtatttatttattttttaattattttgtgcagcgatgggggcggggggggggggggggcgcgcgccaggcggggcggggcggggcgaggggcggggcggggcgaggcggagaggtgcggcggcagccaatcagagcggcgcgctccgaaagtttccttttatggcgaggcggcggcggcggcggccctataaaaagcgaagcgcgcggcgggcggatatctcagatcgcctggagacgccatccacgctgttttgacctccatagaagacaccgggaccgatccagcctccgcggattcgaatcccggccgggaacggtgcattggaacgcggattccccgtgccaagagtgacgtaagtaccgcctatagagtctataggcccacaaaaaatgctttcttcttttaatatacttttttgtttatcttatttctaatactttccctaatctctttctttcagggcaataatgatacaatgtatcatgcctctttgcaccattctaaagaataacagtgataatttctgggttaaggcaatagcaatatttctgcatataaatatttctgcatataaattgtaactgatgtaagaggtttcatattgctaatagcagctacaatccagctaccattctgcttttattttatggttgggataaggctggattattctgagtccaagctaggcccttttgctaatcatgttcatacctcttatcttcctcccacagctcctgggcaacgtgctggtctgtgtgctggcccatcactttggcaaagaatttgagcggccgccaccatggcttctgcatcaacttctaaatataattcacactccttggagaatgagtctattaagaggacgtctcgagatggagtcaatcgagatctcactgaggctgttcctcgacttccaggagaaacactaatcactgacaaagaagttatttacatatgtcctttcaatggccccattaagggaagagtttacatcacaaattatcgtctttatttaagaagtttggaaacggattcttctctaatacttgatgttcctctgggtgtgatctcgagaattgaaaaaatgggaggcgcgacaagtagaggagaaaattcctatggtctagatattacttgtaaagacatgagaaacctgaggttcgctttgaaacaggaaggccacagcagaagagatatgtttgagatcctcacgagatacgcgtttcccctggctcacagtctgccattatttgcatttttaaatgaagaaaagtttaacgtggatggatggacagtttacaatccagtggaagaatacaggaggcagggcttgcccaatcaccattggagaataacttttattaataagtgctatgagctctgtgacacttaccctgctcttttggtggttccgtatcgtgcctcagatgatgacctccggagagttgcaacttttaggtcccgaaatcgaattccagtgctgtcatggattcatccagaaaataagacggtcattgtgcgttgcagtcagcctcttgtcggtatgagtgggaaacgaaataaagatgatgagaaatatctcgatgttatcagggagactaataaacaaatttctaaactcaccatttatgatgcaagacccagcgtaaatgcagtggccaacaaggcaacaggaggaggatatgaaagtgatgatgcatatcataacgccgaacttttcttcttagacattcataatattcatgttatgcgggaatctttaaaaaaagtgaaggacattgtttatcctaatgtagaagaatctcattggttgtccagtttggagtctactcattggttagaacatatcaagctcgttttgacaggagccattcaagtagcagacaaagtttcttcagggaagagttcagtgcttgtgcattgcagtgacggatgggacaggactgctcagctgacatccttggccatgctgatgttggatagcttctataggagcattgaagggttcgaaatactggtacaaaaagaatggataagttttggacataaatttgcatctcgaataggtcatggtgataaaaaccacaccgatgctgaccgttctcctatttttctccagtttattgattgtgtgtggcaaatgtcaaaacagttccctacagcttttgaattcaatgaacaatttttgattataattttggatcatctgtatagttgccgatttggtactttcttattcaactgtgaatctgctcgagaaagacagaaggttacagaaaggactgtttctttatggtcactgataaacagtaataaagaaaaattcaaaaaccccttctatactaaagaaatcaatcgagttttatatccagttgccagtatgcgtcacttggaactctgggtgaattactacattagatggaaccccaggatcaagcaacaacagccgaatccagtggagcagcgttacatggagctcttagccttacgcgacgaatacataaagcggcttgaggaactgcagctcgccaactctgccaagctttctgatcccccaacttcaccttccagtccttcgcaaatgatgccccatgtgcaaactcacttttaattaagatctttttccctctgccaaaaattatggggacatcatgaagccccttgagcatctgacttctggctaataaaggaaatttattttcattgcaatagtgtgttggaattttttgtgtctctcactcgaggcctaggaacccctagtgatggagttggccactccctctctgcgcgctcgctcgctcactgaggccgggcgaccaaaggtcgcccgacgcccgggctttgcccgggcggcctcagtgagcgagcgagcgcgcagagagggagtggccaa

SEQ ID NO: 190 - DNA, 75 bp, Artificial Sequence
  Description of Artificial Sequence: Synthetic oligonucleotide
ttgtcgactcggttcgcatattaaggtgacgcgtgtggcctcgaacaccgagcgaccctgcagcgacccgcttaa

SEQ ID NO: 191 - DNA, 121 bp, Artificial Sequence
  Description of Artificial Sequence: Synthetic polynucleotide
ccactccctctctgcgcgctcgctcgctcactgaggccgggcgaccaaaggtcgcccgacgcccgggctttgcccgggcggcctcagtgagcgagcgagcgcgcagagagggagtggccaa

SEQ ID NO: 192 - DNA, 136 bp, Artificial Sequence
  Description of Artificial Sequence: Synthetic polynucleotide
ttttttggtaccttcgcatattaaggtgacgcgtgtggcctcgaacaccgagcgaccctgcagcgacccgcttaagcggccgccaccatggcatcagcaagcacaagcaaatacaactcacatagcctggaaaacg

SEQ ID NO: 193 - DNA, 2239 bp, Artificial Sequence
  Description of Artificial Sequence: Synthetic polynucleotide
agtgagcgagcgagcgcgcagagagggagtggccaactccatcactaggggttccttgcgcacaggtaccttcgcatattaaggtgacgcgtgtggcctcgaacaccgagcgaccctgcagcgacccgcttaagcggccgccaccatggcttctgcatcaacttctaaatataattcacactccttggagaatgagtctattaagaggacgtctcgagatggagtcaatcgagatctcactgaggctgttcctcgacttccaggagaaacactaatcactgacaaagaagttatttacatatgtcctttcaatggccccattaagggaagagtttacatcacaaattatcgtctttatttaagaagtttggaaacggattcttctctaatacttgatgttcctctgggtgtgatctcgagaattgaaaaaatgggaggcgcgacaagtagaggagaaaattcctatggtctagatattacttgtaaagacatgagaaacctgaggttcgctttgaaacaggaaggccacagcagaagagatatgtttgagatcctcacgagatacgcgtttcccctggctcacagtctgccattatttgcatttttaaatgaagaaaagtttaacgtggatggatggacagtttacaatccagtggaagaatacaggaggcagggcttgcccaatcaccattggagaataacttttattaataagtgctatgagctctgtgacacttaccctgctcttttggtggttccgtatcgtgcctcagatgatgacctccggagagttgcaacttttaggtcccgaaatcgaattccagtgctgtcatggattcatccagaaaataagacggtcattgtgcgttgcagtcagcctcttgtcggtatgagtgggaaacgaaataaagatgatgagaaatatctcgatgttatcagggagactaataaacaaatttctaaactcaccatttatgatgcaagacccagcgtaaatgcagtggccaacaaggcaacaggaggaggatatgaaagtgatgatgcatatcataacgccgaacttttcttcttagacattcataatattcatgttatgcgggaatctttaaaaaaagtgaaggacattgtttatcctaatgtagaagaatctcattggttgtccagtttggagtctactcattggttagaacatatcaagctcgttttgacaggagccattcaagtagcagacaaagtttcttcagggaagagttcagtgcttgtgcattgcagtgacggatgggacaggactgctcagctgacatccttggccatgctgatgttggatagcttctataggagcattgaagggttcgaaatactggtacaaaaagaatggataagttttggacataaatttgcatctcgaataggtcatggtgataaaaaccacaccgatgctgaccgttctcctatttttctccagtttattgattgtgtgtggcaaatgtcaaaacagttccctacagcttttgaattcaatgaacaatttttgattataattttggatcatctgtatagttgccgatttggtactttcttattcaactgtgaatctgctcgagaaagacagaaggttacagaaaggactgtttctttatggtcactgataaacagtaataaagaaaaattcaaaaaccccttctatactaaagaaatcaatcgagttttatatccagttgccagtatgcgtcacttggaactctgggtgaattactacattagatggaaccccaggatcaagcaacaacagccgaatccagtggagcagcgttacatggagctcttagccttacgcgacgaatacataaagcggcttgaggaactgcagctcgccaactctgccaagctttctgatcccccaacttcaccttccagtccttcgcaaatgatgccccatgtgcaaactcacttttaattaagatctttttccctctgccaaaaattatggggacatcatgaagccccttgagcatctgacttctggctaataaaggaaatttattttcattgcaatagtgtgttggaattttttgtgtctctcactcgaggcctaggaacccctagtgatggagttggccactccctctctgcgcgctcgctcgctcactgaggccgggcgaccaaaggtcgcccgacgcccgggctttgcccgggcggcctcagtgagcgagcgagcgcgcagagagggagtggccaa

SEQ ID NO: 194 - DNA, 2040 bp, Artificial Sequence
  Description of Artificial Sequence: Synthetic polynucleotide
tttttgtcgacttcgcatattaaggtgacgcgtgtggcctcgaacaccgagcgaccctgcagcgacccgcttaagcggccgccaccatggcttctgcatcaacttctaaatataattcacactccttggagaatgagtctattaagaggacgtctcgagatggagtcaatcgagatctcactgaggctgttcctcgacttccaggagaaacactaatcactgacaaagaagttatttacatatgtcctttcaatggccccattaagggaagagtttacatcacaaattatcgtctttatttaagaagtttggaaacggattcttctctaatacttgatgttcctctgggtgtgatctcgagaattgaaaaaatgggaggcgcgacaagtagaggagaaaattcctatggtctagatattacttgtaaagacatgagaaacctgaggttcgctttgaaacaggaaggccacagcagaagagatatgtttgagatcctcacgagatacgcgtttcccctggctcacagtctgccattatttgcatttttaaatgaagaaaagtttaacgtggatggatggacagtttacaatccagtggaagaatacaggaggcagggcttgcccaatcaccattggagaataacttttattaataagtgctatgagctctgtgacacttaccctgctcttttggtggttccgtatcgtgcctcagatgatgacctccggagagttgcaacttttaggtcccgaaatcgaattccagtgctgtcatggattcatccagaaaataagacggtcattgtgcgttgcagtcagcctcttgtcggtatgagtgggaaacgaaataaagatgatgagaaatatctcgatgttatcagggagactaataaacaaatttctaaactcaccatttatgatgcaagacccagcgtaaatgcagtggccaacaaggcaacaggaggaggatatgaaagtgatgatgcatatcataacgccgaacttttcttcttagacattcataatattcatgttatgcgggaatctttaaaaaaagtgaaggacattgtttatcctaatgtagaagaatctcattggttgtccagtttggagtctactcattggttagaacatatcaagctcgttttgacaggagccattcaagtagcagacaaagtttcttcagggaagagttcagtgcttgtgcattgcagtgacggatgggacaggactgctcagctgacatccttggccatgctgatgttggatagcttctataggagcattgaagggttcgaaatactggtacaaaaagaatggataagttttggacataaatttgcatctcgaataggtcatggtgataaaaaccacaccgatgctgaccgttctcctatttttctccagtttattgattgtgtgtggcaaatgtcaaaacagttccctacagcttttgaattcaatgaacaatttttgattataattttggatcatctgtatagttgccgatttggtactttcttattcaactgtgaatctgctcgagaaagacagaaggttacagaaaggactgtttctttatggtcactgataaacagtaataaagaaaaattcaaaaaccccttctatactaaagaaatcaatcgagttttatatccagttgccagtatgcgtcacttggaactctgggtgaattactacattagatggaaccccaggatcaagcaacaacagccgaatccagtggagcagcgttacatggagctcttagccttacgcgacgaatacataaagcggcttgaggaactgcagctcgccaactctgccaagctttctgatcccccaacttcaccttccagtccttcgcaaatgatgccccatgtgcaaactcacttttaattaagatctttttccctctgccaaaaattatggggacatcatgaagccccttgagcatctgacttctggctaataaaggaaatttattttcattgcaatagtgtgttggaattttttgtgtctctcactccctaggaaaaaa

SEQ ID NO: 195 - DNA, 2040 bp, Artificial Sequence; identical to SEQ ID NO: 194
  Description of Artificial Sequence: Synthetic polynucleotide

SEQ ID NO: 196 - DNA, 2201 bp, Artificial Sequence
  Description of Artificial Sequence: Synthetic polynucleotide
tttttgtcgaccctctataaatacccgctctgggttggcagctgttgctgcggtgtgtgtgggcgtgggtggtgtgagtagggggatgaatcagggagggggcgggggcagggggcaggagccacacaaacctgccctggcgaagacccccgctggctgactcagggatcttgcagctgtcaggggggagggatacaaatagtgccgacggctgggggccctgtctcccctcgccgcggccgccaccatggcttctgcatcaacttctaaatataattcacactccttggagaatgagtctattaagaggacgtctcgagatggagtcaatcgagatctcactgaggctgttcctcgacttccaggagaaacactaatcactgacaaagaagttatttacatatgtcctttcaatggccccattaagggaagagtttacatcacaaattatcgtctttatttaagaagtttggaaacggattcttctctaatacttgatgttcctctgggtgtgatctcgagaattgaaaaaatgggaggcgcgacaagtagaggagaaaattcctatggtctagatattacttgtaaagacatgagaaacctgaggttcgctttgaaacaggaaggccacagcagaagagatatgtttgagatcctcacgagatacgcgtttcccctggctcacagtctgccattatttgcatttttaaatgaagaaaagtttaacgtggatggatggacagtttacaatccagtggaagaatacaggaggcagggcttgcccaatcaccattggagaataacttttattaataagtgctatgagctctgtgacacttaccctgctcttttggtggttccgtatcgtgcctcagatgatgacctccggagagttgcaacttttaggtcccgaaatcgaattccagtgctgtcatggattcatccagaaaataagacggtcattgtgcgttgcagtcagcctcttgtcggtatgagtgggaaacgaaataaagatgatgagaaatatctcgatgttatcagggagactaataaacaaatttctaaactcaccatttatgatgcaagacccagcgtaaatgcagtggccaacaaggcaacaggaggaggatatgaaagtgatgatgcatatcataacgccgaacttttcttcttagacattcataatattcatgttatgcgggaatctttaaaaaaagtgaaggacattgtttatcctaatgtagaagaatctcattggttgtccagtttggagtctactcattggttagaacatatcaagctcgttttgacaggagccattcaagtagcagacaaagtttcttcagggaagagttcagtgcttgtgcattgcagtgacggatgggacaggactgctcagctgacatccttggccatgctgatgttggatagcttctataggagcattgaagggttcgaaatactggtacaaaaagaatggataagttttggacataaatttgcatctcgaataggtcatggtgataaaaaccacaccgatgctgaccgttctcctatttttctccagtttattgattgtgtgtggcaaatgtcaaaacagttccctacagcttttgaattcaatgaacaatttttgattataattttggatcatctgtatagttgccgatttggtactttcttattcaactgtgaatctgctcgagaaagacagaaggttacagaaaggactgtttctttatggtcactgataaacagtaataaagaaaaattcaaaaaccccttctatactaaagaaatcaatcgagttttatatccagttgccagtatgcgtcacttggaactctgggtgaattactacattagatggaaccccaggatcaagcaacaacagccgaatccagtggagcagcgttacatggagctcttagccttacgcgacgaatacataaagcggcttgaggaactgcagctcgccaactctgccaagctttctgatcccccaacttcaccttccagtccttcgcaaatgatgccccatgtgcaaactcacttttaattaagatctttttccctctgccaaaaattatggggacatcatgaagccccttgagcatctgacttctggctaataaaggaaatttattttcattgcaatagtgtgttggaattttttgtgtctctcactccctaggaaaaaa

SEQ ID NO: 197 - DNA, 2400 bp, Artificial Sequence
  Description of Artificial Sequence: Synthetic polynucleotide
agtgagcgagcgagcgcgcagagagggagtggccaactccatcactaggggttccttgcgcacaggtacccctctataaatacccgctctgggttggcagctgttgctgcggtgtgtgtgggcgtgggtggtgtgagtagggggatgaatcagggagggggcgggggcagggggcaggagccacacaaacctgccctggcgaagacccccgctggctgactcagggatcttgcagctgtcaggggggagggatacaaatagtgccgacggctgggggccctgtctcccctcgccgcggccgccaccatggcttctgcatcaacttctaaatataattcacactccttggagaatgagtctattaagaggacgtctcgagatggagtcaatcgagatctcactgaggctgttcctcgacttccaggagaaacactaatcactgacaaagaagttatttacatatgtcctttcaatggccccattaagggaagagtttacatcacaaattatcgtctttatttaagaagtttggaaacggattcttctctaatacttgatgttcctctgggtgtgatctcgagaattgaaaaaatgggaggcgcgacaagtagaggagaaaattcctatggtctagatattacttgtaaagacatgagaaacctgaggttcgctttgaaacaggaaggccacagcagaagagatatgtttgagatcctcacgagatacgcgtttcccctggctcacagtctgccattatttgcatttttaaatgaagaaaagtttaacgtggatggatggacagtttacaatccagtggaagaatacaggaggcagggcttgcccaatcaccattggagaataacttttattaataagtgctatgagctctgtgacacttaccctgctcttttggtggttccgtatcgtgcctcagatgatgacctccggagagttgcaacttttaggtcccgaaatcgaattccagtgctgtcatggattcatccagaaaataagacggtcattgtgcgttgcagtcagcctcttgtcggtatgagtgggaaacgaaataaagatgatgagaaatatctcgatgttatcagggagactaataaacaaatttctaaactcaccatttatgatgcaagacccagcgtaaatgcagtggccaacaaggcaacaggaggaggatatgaaagtgatgatgcatatcataacgccgaacttttcttcttagacattcataatattcatgttatgcgggaatctttaaaaaaagtgaaggacattgtttatcctaatgtagaagaatctcattggttgtccagtttggagtctactcattggttagaacatatcaagctcgttttgacaggagccattcaagtagcagacaaagtttcttcagggaagagttcagtgcttgtgcattgcagtgacggatgggacaggactgctcagctgacatccttggccatgctgatgttggatagcttctataggagcattgaagggttcgaaatactggtacaaaaagaatggataagttttggacataaatttgcatctcgaataggtcatggtgataaaaaccacaccgatgctgaccgttctcctatttttctccagtttattgattgtgtgtggcaaatgtcaaaacagttccctacagcttttgaattcaatgaacaatttttgattataattttggatcatctgtatagttgccgatttggtactttcttattcaactgtgaatctgctcgagaaagacagaaggttacagaaaggactgtttctttatggtcactgataaacagtaataaagaaaaattcaaaaaccccttctatactaaagaaatcaatcgagttttatatccagttgccagtatgcgtcacttggaactctgggtgaattactacattagatggaaccccaggatcaagcaacaacagccgaatccagtggagcagcgttacatggagctcttagccttacgcgacgaatacataaagcggcttgaggaactgcagctcgccaactctgccaagctttctgatcccccaacttcaccttccagtccttcgcaaatgatgccccatgtgcaaactcacttttaattaagatctttttccctctgccaaaaattatggggacatcatgaagccccttgagcatctgacttctggctaataaaggaaatttattttcattgcaatagtgtgttggaattttttgtgtctctcactcgaggcctaggaacccctagtgatggagttggccactccctctctgcgcgctcgctcgctcactgaggccgggcgaccaaaggtcgcccgacgcccgggctttgcccgggcggcctcagtgagcgagcgagcgcgcagagagggagtggccaa

SEQ ID NO: 198 - DNA, 2201 bp, Artificial Sequence; identical to SEQ ID NO: 196
  Description of Artificial Sequence: Synthetic polynucleotide

SEQ ID NO: 199 - DNA, 2459 bp, Artificial Sequence
  Description of Artificial Sequence: Synthetic polynucleotide
ttggccactccctctctgcgcgctcgctcgctcactgaggccgcccgggcaaagcccgggcgtcgggcgacctttggtcgcccggcctcagtgagcgagcgagcgcgcagagagggagtggccaactccatcactaggggttcctttgtcgaccctctataaatacccgctctgggttggcagctgttgctgcggtgtgtgtgggcgtgggtggtgtgagtagggggatgaatcagggagggggcgggggcagggggcaggagccacacaaacctgccctggcgaagacccccgctggctgactcagggatcttgcagctgtcaggggggagggatacaaatagtgccgacggctgggggccctgtctcccctcgccgcggccgccaccatggcttctgcatcaacttctaaatataattcacactccttggagaatgagtctattaagaggacgtctcgagatggagtcaatcgagatctcactgaggctgttcctcgacttccaggagaaacactaatcactgacaaagaagttatttacatatgtcctttcaatggccccattaagggaagagtttacatcacaaattatcgtctttatttaagaagtttggaaacggattcttctctaatacttgatgttcctctgggtgtgatctcgagaattgaaaaaatgggaggcgcgacaagtagaggagaaaattcctatggtctagatattacttgtaaagacatgagaaacctgaggttcgctttgaaacaggaaggccacagcagaagagatatgtttgagatcctcacgagatacgcgtttcccctggctcacagtctgccattatttgcatttttaaatgaagaaaagtttaacgtggatggatggacagtttacaatccagtggaagaatacaggaggcagggcttgcccaatcaccattggagaataacttttattaataagtgctatgagctctgtgacacttaccctgctcttttggtggttccgtatcgtgcctcagatgatgacctccggagagttgcaacttttaggtcccgaaatcgaattccagtgctgtcatggattcatccagaaaataagacggtcattgtgcgttgcagtcagcctcttgtcggtatgagtgggaaacgaaataaagatgatgagaaatatctcgatgttatcagggagactaataaacaaatttctaaactcaccatttatgatgcaagacccagcgtaaatgcagtggccaacaaggcaacaggaggaggatatgaaagtgatgatgcatatcataacgccgaacttttcttcttagacattcataatattcatgttatgcgggaatctttaaaaaaagtgaaggacattgtttatcctaatgtagaagaatctcattggttgtccagtttggagtctactcattggttagaacatatcaagctcgttttgacaggagccattcaagtagcagacaaagtttcttcagggaagagttcagtgcttgtgcattgcagtgacggatgggacaggactgctcagctgacatccttggccatgctgatgttggatagcttctataggagcattgaagggttcgaaatactggtacaaaaagaatggataagttttggacataaatttgcatctcgaataggtcatggtgataaaaaccacaccgatgctgaccgttctcctatttttctccagtttattgattgtgtgtggcaaatgtcaaaacagttccctacagcttttgaattcaatgaacaatttttgattataattttggatcatctgtatagttgccgatttggtactttcttattcaactgtgaatctgctcgagaaagacagaaggttacagaaaggactgtttctttatggtcactgataaacagtaataaagaaaaattcaaaaaccccttctatactaaagaaatcaatcgagttttatatccagttgccagtatgcgtcacttggaactctgggtgaattactacattagatggaaccccaggatcaagcaacaacagccgaatccagtggagcagcgttacatggagctcttagccttacgcgacgaatacataaagcggcttgaggaactgcagctcgccaactctgccaagctttctgatcccccaacttcaccttccagtccttcgcaaatgatgccccatgtgcaaactcacttttaattaagatctttttccctctgccaaaaattatggggacatcatgaagccccttgagcatctgacttctggctaataaaggaaatttattttcattgcaatagtgtgttggaattttttgtgtctctcactcgcctaggccactccctctctgcgcgctcgctcgctcactgaggccgggcgaccaaaggtcgcccgacgcccgggctttgcccgggcggcctcagtgagcgagcgagcgcgcagagagggagtggccaa

SEQ ID NO: 200 - DNA, 681 bp, Artificial Sequence
  Description of Artificial Sequence: Synthetic polynucleotide
ttttggtaccgacattgattattgactagttattaatagtaatcaattacggggtcattagttcatagcccatatatggagttccgcgttacataacttacggtaaatggcccgcctggctgaccgcccaacgacccccgcccattgacgtcaataatgacgtatgttcccatagtaacgccaatagggactttccattgacgtcaatgggtggagtatttacggtaaactgcccacttggcagtacatcaagtgtatcatatgccaagtacgccccctattgacgtcaatgacggtaaatggcccgcctggcattatgcccagtacatgaccttatgggactttcctacttggcagtacatctacgtattagtcatcgctattaccatggtcgaggtgagccccacgttctgcttcactctccccatctcccccccctccccacccccaattttgtatttatttattttttaattattttgtgcagcgatgggggcggggggggggggggggcgcgcgccaggcggggcggggcggggcgaggggcggggcggggcgaggcggagaggtgcggcggcagccaatcagagcggcgcgctccgaaagtttccttttatggcgaggcggcggcggcggcggccctataaaaagcgaagcgcgcggcgggcggatatctttttt

SEQ ID NO: 201 - DNA, 2900 bp, Artificial Sequence
  Description of Artificial Sequence: Synthetic polynucleotide
ttggccactccctctctgcgcgctcgctcgctcactgaggccgcccgggcaaagcccgggcgtcgggcgacctttggtcgcccggcctcagtgagcgagcgagcgcgcagagagggagtggccaactccatcactaggggttcctttgtcgacgacattgattattgactagttattaatagtaatcaattacggggtcattagttcatagcccatatatggagttccgcgttacataacttacggtaaatggcccgcctggctgaccgcccaacgacccccgcccattgacgtcaataatgacgtatgttcccatagtaacgccaatagggactttccattgacgtcaatgggtggagtatttacggtaaactgcccacttggcagtacatcaagtgtatcatatgccaagtacgccccctattgacgtcaatgacggtaaatggcccgcctggcattatgcccagtacatgaccttatgggactttcctacttggcagtacatctacgtattagtcatcgctattaccatggtcgaggtgagccccacgttctgcttcactctccccatctcccccccctccccacccccaattttgtatttatttattttttaattattttgtgcagcgatgggggcggggggggggggggggcgcgcgccaggcggggcggggcggggcgaggggcggggcggggcgaggcggagaggtgcggcggcagccaatcagagcggcgcgctccgaaagtttccttttatggcgaggcggcggcggcggcggccctataaaaagcgaagcgcgcggcgggcgggagtggctgcgcgctgccttcgccccgtgccccgctccgccgccgcctcgcgccgcccgccccggctctgactgaccgcgttactcccacaggtgagcgggcgggacggcccttctcctccgggctgtaattagcgcttggtttaatgacggcttgtttcttttctgtggctgcgtgaaagccttgaggggctccgggagggccctttgtgcggggggagcggctcggggggtgcgtgcgtgtgtgtgtgcgtggggagcgccgcgtgcggctccgcgctgcccggcggctgtgagcgctgcgggcgcggcgcggggctttgtgcgctccgcagtgtgcgcgaggggagcgcggccgggggcggtgccccgcggtgcggggggggctgcgaggggaacaaaggctgcgtgcggggtgtgtgcgtgggggggtgagcagggggtgtgggcgcgtcggtcgggctgcaaccccccctgcacccccctccccgagttgctgagcacggcccggcttcgggtgcggggctccgtacggggcgtggcgcggggctcgccgtgccgggcggggggtggcggcaggtgggggtgccgggcggggcggggccgcctcgggccggggagggctcgggggaggggcgcggcggcccccggagcgccggcggctgtcgaggcgcggcgagccgcagccattgccttttatggtaatcgtgcgagagggcgcagggacttcctttgtcccaaatctgtgcggagccgaaatctgggaggcgccgccgcaccccctctagcgggcgcggggcgaagcggtgcggcgccggcaggaaggaaatgggcggggagggccttcgtgcgtcgccgcgccgccgtccccttctccctctccagcctcggggctgtccgcggggggacggctgccttcgggggggacggggcagggcggggttcggcttctggcgtgtgaccggcggctctagagcctctgctaaccatgttcatgccttcttctttttcctacagctcctgggcaacgtgctggttattgtgctgtctcatcattttggcaaaagatctgccgccaccatggtgagcaagggcgaggagctgttcaccggggtggtgcccatcctggtcgagctggacggcgacgtaaacggccacaagttcagcgtgtccggcgagggcgagggcgatgccacctacggcaagctgaccctgaagttcatctgcaccaccggcaagctgcccgtgccctggcccaccctcgtgaccaccctgacctacggcgtgcagtgcttcagccgctaccccgaccacatgaagcagcacgacttcttcaagtccgccatgcccgaaggctacgtccaggagcgcaccatcttcttcaaggacgacggcaactacaagacccgcgccgaggtgaagttcgagggcgacaccctggtgaaccgcatcgagctgaagggcatcgacttcaaggaggacggcaacatcctggggcacaagctggagtacaactacaacagccacaacgtctatatcatggccgacaagcagaagaacggcatcaaggtgaacttcaagatccgccacaacatcgaggacggcagcgtgcagctcgccgaccactaccagcagaacacccccatcggcgacggccccgtgctgctgcccgacaaccactacctgagcacccagtccgccctgagcaaagaccccaacgagaagcgcgatcacatggtcctgctggagttcgtgaccgccgccgggatcactctcggcatggacgagctgtacaagtgagagctcgatctttttccctctgccaaaaattatggggacatcatgaagccccttgagcatctgacttctggctaataaaggaaatttattttcattgcaatagtgtgttggaattttttgtgtctctcactcggaagcctaggaggaacccctagtgatggagttggccactccctctctgcgcgctcgctcgctcactgaggccgggcgaccaaaggtcgcccgacgcccgggctttgcccgggcggcctcagtgagcgagcgagcgcgcagagagggagtggccaa

SEQ ID NO: 202 - DNA, 1849 bp, Artificial Sequence
  Description of Artificial Sequence: Synthetic polynucleotide
caaagaatttgagcggccgccaccatggcttctgcatcaacttctaaatataattcacactccttggagaatgagtctattaagaggacgtctcgagatggagtcaatcgagatctcactgaggctgttcctcgacttccaggagaaacactaatcactgacaaagaagttatttacatatgtcctttcaatggccccattaagggaagagtttacatcacaaattatcgtctttatttaagaagtttggaaacggattcttctctaatacttgatgttcctctgggtgtgatctcgagaattgaaaaaatgggaggcgcgacaagtagaggagaaaattcctatggtctagatattacttgtaaagacatgagaaacctgaggttcgctttgaaacaggaaggccacagcagaagagatatgtttgagatcctcacgagatacgcgtttcccctggctcacagtctgccattatttgcatttttaaatgaagaaaagtttaacgtggatggatggacagtttacaatccagtggaagaatacaggaggcagggcttgcccaatcaccattggagaataacttttattaataagtgctatgagctctgtgacacttaccctgctcttttggtggttccgtatcgtgcctcagatgatgacctccggagagttgcaacttttaggtcccgaaatcgaattccagtgctgtcatggattcatccagaaaataagacggtcattgtgcgttgcagtcagcctcttgtcggtatgagtgggaaacgaaataaagatgatgagaaatatctcgatgttatcagggagactaataaacaaatttctaaactcaccatttatgatgcaagacccagcgtaaatgcagtggccaacaaggcaacaggaggaggatatgaaagtgatgatgcatatcataacgccgaacttttcttcttagacattcataatattcatgttatgcgggaatctttaaaaaaagtgaaggacattgtttatcctaatgtagaagaatctcattggttgtccagtttggagtctactcattggttagaacatatcaagctcgttttgacaggagccattcaagtagcagacaaagtttcttcagggaagagttcagtgcttgtgcattgcagtgacggatgggacaggactgctcagctgacatccttggccatgctgatgttggatagcttctataggagcattgaagggttcgaaatactggtacaaaaagaatggataagttttggacataaatttgcatctcgaataggtcatggtgataaaaaccacaccgatgctgaccgttctcctatttttctccagtttattgattgtgtgtggcaaatgtcaaaacagttccctacagcttttgaattcaatgaacaatttttgattataattttggatcatctgtatagttgccgatttggtactttcttattcaactgtgaatctgctcgagaaagacagaaggttacagaaaggactgtttctttatggtcactgataaacagtaataaagaaaaattcaaaaaccccttctatactaaagaaatcaatcgagttttatatccagttgccagtatgcgtcacttggaactctgggtgaattactacattagatggaaccccaggatcaagcaacaacagccgaatccagtggagcagcgttacatggagctcttagccttacgcgacgaatacataaagcggcttgaggaactgcagctcgccaactctgccaagctttctgatcccccaacttcaccttccagtccttcgcaaatgatgccccatgtgcaaactcacttttaattaagatcttttt

SEQ ID NO: 203 - DNA, 1837 bp, Artificial Sequence
  Description of Artificial Sequence: Synthetic polynucleotide
tttgagcggccgccaccatggcttctgcatcaacttctaaatataattcacactccttggagaatgagtctattaagaggacgtctcgagatggagtcaatcgagatctcactgaggctgttcctcgacttccaggagaaacactaatcactgacaaagaagttatttacatatgtcctttcaatggccccattaagggaagagtttacatcacaaattatcgtctttatttaagaagtttggaaacggattcttctctaatacttgatgttcctctgggtgtgatctcgagaattgaaaaaatgggaggcgcgacaagtagaggagaaaattcctatggtctagatattacttgtaaagacatgagaaacctgaggttcgctttgaaacaggaaggccacagcagaagagatatgtttgagatcctcacgagatacgcgtttcccctggctcacagtctgccattatttgcatttttaaatgaagaaaagtttaacgtggatggatggacagtttacaatccagtggaagaatacaggaggcagggcttgcccaatcaccattggagaataacttttattaataagtgctatgagctctgtgacacttaccctgctcttttggtggttccgtatcgtgcctcagatgatgacctccggagagttgcaacttttaggtcccgaaatcgaattccagtgctgtcatggattcatccagaaaataagacggtcattgtgcgttgcagtcagcctcttgtcggtatgagtgggaaacgaaataaagatgatgagaaatatctcgatgttatcagggagactaataaacaaatttctaaactcaccatttatgatgcaagacccagcgtaaatgcagtggccaacaaggcaacaggaggaggatatgaaagtgatgatgcatatcataacgccgaacttttcttcttagacattcataatattcatgttatgcgggaatctttaaaaaaagtgaaggacattgtttatcctaatgtagaagaatctcattggttgtccagtttggagtctactcattggttagaacatatcaagctcgttttgacaggagccattcaagtagcagacaaagtttcttcagggaagagttcagtgcttgtgcattgcagtgacggatgggacaggactgctcagctgacatccttggccatgctgatgttggatagcttctataggagcattgaagggttcgaaatactggtacaaaaagaatggataagttttggacataaatttgcatctcgaataggtcatggtgataaaaaccacaccgatgctgaccgttctcctatttttctccagtttattgattgtgtgtggcaaatgtcaaaacagttccctacagcttttgaattcaatgaacaatttttgattataattttggatcatctgtatagttgccgatttggtactttcttattcaactgtgaatctgctcgagaaagacagaaggttacagaaaggactgtttctttatggtcactgataaacagtaataaagaaaaattcaaaaaccccttctatactaaagaaatcaatcgagttttatatccagttgccagtatgcgtcacttggaactctgggtgaattactacattagatggaaccccaggatcaagcaacaacagccgaatccagtggagcagcgttacatggagctcttagccttacgcgacgaatacataaagcggcttgaggaactgcagctcgccaactctgccaagctttctgatcccccaacttcaccttccagtccttcgcaaatgatgccccatgtgcaaactcacttttaattaagatc

SEQ ID NO: 204 - DNA, 1334 bp, Artificial Sequence
  Description of Artificial Sequence: Synthetic polynucleotide
ttggccactccctctctgcgcgctcgctcgctcactgaggccgcccgggcaaagcccgggcgtcgggcgacctttggtcgcccggcctcagtgagcgagcgagcgcgcagagagggagtggccaactccatcactaggggttccttgcgcacaggtacccccctgcccccacagctcctctcctgtgccttgtttcccagccatgcgttctcctctataaatacccgctctggtatttggggttggcagctgttgctgccagggagatggttgggttgacatgcggctcctgacaaaacacaaacccctggtgtgtgtgggcgtgggtggtgtgagtagggggatgaatcagggagggggcgggggacccagggggcaggagccacacaaagtctgtgcgggggtgggagcgcacatagcaattggaaactggctgcagacatgcttgctgcctgccctggcgaaggattggtaggcttgccgtcacaggacccccgctggctgactcaggggcgcaggctcttgcgggggagctggcctcccgcccccacggccacgggccctttcctggcaggacagcgggatcttgcagctgtcaggggaggggaggcgggggctgatgtcaggagggatacaaatagtgccgacggctgggggccctgtctcccctcgccgcatccactctccggccggccgcctgcccgccgcctcctccgtgcgcccgccagcctcgcccgcgccgtcaccgatatctcagatcgcctggagacgccatccacgctgttttgacctccatagaagacaccgggaccgatccagcctccgcggattcgaatcccggccgggaacggtgcattggaacgcggattccccgtgccaagagtgacgtaagtaccgcctatagagtctataggcccacaaaaaatgctttcttcttttaatatacttttttgtttatcttatttctaatactttccctaatctctttctttcagggcaataatgatacaatgtatcatgcctctttgcaccattctaaagaataacagtgataatttctgggttaaggcaatagcaatatttctgcatataaatatttctgcatataaattgtaactgatgtaagaggtttcatattgctaatagcagctacaatccagctaccattctgcttttattttatggttgggataaggctggattattctgagtccaagctaggcccttttgctaatcatgttcatacctcttatcttcctcccacagctcctgggcaacgtgctggtctgtgtgctggcccatcactttggcaaagaattggatccgccgccacc

SEQ ID NO: 205 - DNA, 353 bp, Artificial Sequence
  Description of Artificial Sequence: Synthetic polynucleotide
taagtcgacgtaagtttttaaatgtataaattgtcttatttataaattggtctaaaatatatgtaattgtcttaagatctttttccctctgccaaaaattatggggacatcatgaagccccttgagcatctgacttctggctaataaaggaaatttattttcattgcaatagtgtgttggaattttttgtgtctctcactcgaggcctaggaacccctagtgatggagttggccactccctctctgcgcgctcgctcgctcactgaggccgggcgaccaaaggtcgcccgacgcccgggctttgcccgggcggcctcagtgagcgagcgagcgcgcagagagggagtggccaa

SEQ ID NO: 206 - DNA, 220 bp, Artificial Sequence
  Description of Artificial Sequence: Synthetic polynucleotide
ttggccactccctctctgcgcgctcgctcgctcactgaggccgcccgggcaaagcccgggcgtcgggcgacctttggtcgcccggcctcagtgagcgagcgagcgcgcagagagggagtggccaactccatcactaggggttcctttgtcgactcggttcgcatattaaggtgacgcgtgtggcctcgaacaccgagcgaccctgcagcgacccgcttaa

SEQ ID NO: 207 - DNA, 187 bp, Artificial Sequence
  Description of Artificial Sequence: Synthetic polynucleotide
aataaaggaaatttattttcattgcaatagtgtgttggaattttttgtgtctctcagagtcctaggccactccctctctgcgcgctcgctcgctcactgaggccgggcgaccaaaggtcgcccgacgcccgggctttgcccgggcggcctcagtgagcgagcgagcgcgcagagagggagtggccaa

SEQ ID NO: 208 - DNA, 2297 bp, Artificial Sequence
  Description of Artificial Sequence: Synthetic polynucleotide
ttggccactccctctctgcgcgctcgctcgctcactgaggccgcccgggcaaagcccgggcgtcgggcgacctttggtcgcccggcctcagtgagcgagcgagcgcgcagagagggagtggccaactccatcactaggggttcctttgtcgacttcgcatattaaggtgacgcgtgtggcctcgaacaccgagcgaccctgcagcgacccgcttaagcggccgccaccatggcttctgcatcaacttctaaatataattcacactccttggagaatgagtctattaagaggacgtctcgagatggagtcaatcgagatctcactgaggctgttcctcgacttccaggagaaacactaatcactgacaaagaagttatttacatatgtcctttcaatggccccattaagggaagagtttacatcacaaattatcgtctttatttaagaagtttggaaacggattcttctctaatacttgatgttcctctgggtgtgatctcgagaattgaaaaaatgggaggcgcgacaagtagaggagaaaattcctatggtctagatattacttgtaaagacatgagaaacctgaggttcgctttgaaacaggaaggccacagcagaagagatatgtttgagatcctcacgagatacgcgtttcccctggctcacagtctgccattatttgcatttttaaatgaagaaaagtttaacgtggatggatggacagtttacaatccagtggaagaatacaggaggcagggcttgcccaatcaccattggagaataacttttattaataagtgctatgagctctgtgacacttaccctgctcttttggtggttccgtatcgtgcctcagatgatgacctccggagagttgcaacttttaggtcccgaaatcgaattccagtgctgtcatggattcatccagaaaataagacggtcattgtgcgttgcagtcagcctcttgtcggtatgagtgggaaacgaaataaagatgatgagaaatatctcgatgttatcagggagactaataaacaaatttctaaactcaccatttatgatgcaagacccagcgtaaatgcagtggccaacaaggcaacaggaggaggatatgaaagtgatgatgcatatcataacgccgaacttttcttcttagacattcataatattcatgttatgcgggaatctttaaaaaaagtgaaggacattgtttatcctaatgtagaagaatctcattggttgtccagtttggagtctactcattggttagaacatatcaagctcgttttgacaggagccattcaagtagcagacaaagtttcttcagggaagagttcagtgcttgtgcattgcagtgacggatgggacaggactgctcagctgacatccttggccatgctgatgttggatagcttctataggagcattgaagggttcgaaatactggtacaaaaagaatggataagttttggacataaatttgcatctcgaataggtcatggtgataaaaaccacaccgatgctgaccgttctcctatttttctccagtttattgattgtgtgtggcaaatgtcaaaacagttccctacagcttttgaattcaatgaacaatttttgattataattttggatcatctgtatagttgccgatttggtactttcttattcaactgtgaatctgctcgagaaagacagaaggttacagaaaggactgtttctttatggtcactgataaacagtaataaagaaaaattcaaaaaccccttctatactaaagaaatcaatcgagttttatatccagttgccagtatgcgtcacttggaactctgggtgaattactacattagatggaaccccaggatcaagcaacaacagccgaatccagtggagcagcgttacatggagctcttagccttacgcgacgaatacataaagcggcttgaggaactgcagctcgccaactctgccaagctttctgatcccccaacttcaccttccagtccttcgcaaatgatgccccatgtgcaaactcacttttaattaagatctttttccctctgccaaaaattatggggacatcatgaagccccttgagcatctgacttctggctaataaaggaaatttattttcattgcaatagtgtgttggaattttttgtgtctctcactccctaggccactccctctctgcgcgctcgctcgctcactgaggccgggcgaccaaaggtcgcccgacgcccgggctttgcccgggcggcctcagtgagcgagcgagcgcgcagagagggagtggccaa

SEQ ID NO: 209 - DNA, 34 bp, Artificial Sequence
  Description of Artificial Sequence: Synthetic primer
ttttggtaccgacattgattattgactagttatt

SEQ ID NO: 210 - DNA, 24 bp, Artificial Sequence
  Description of Artificial Sequence: Synthetic primer
aaaaaagatatccgcccgccgcgc

SEQ ID NO: 211 - DNA, 33 bp, Artificial Sequence
  Description of Artificial Sequence: Synthetic primer
tttttgtcgacttcgcatattaaggtgacgcgt

SEQ ID NO: 212 - DNA, 42 bp, Artificial Sequence
  Description of Artificial Sequence: Synthetic primer
ttttttcctagggagtgagagacacaaaaaattccaacacac

SEQ ID NO: 213 - DNA, 33 bp, Artificial Sequence
  Description of Artificial Sequence: Synthetic primer
tttttgtcgaccctctataaatacccgctctgg

SEQ ID NO: 214 - DNA, 42 bp, Artificial Sequence; identical to SEQ ID NO: 212
  Description of Artificial Sequence: Synthetic primer

SEQ ID NO: 215 - DNA, 15 bp, Artificial Sequence
  Description of Artificial Sequence: Synthetic primer
tttgagcggccgcca

SEQ ID NO: 216 - DNA, 31 bp, Artificial Sequence
  Description of Artificial Sequence: Synthetic primer
gatcttaattaaaagtgagtttgcacatggg

SEQ ID NO: 217 - protein, 735 aa, Adeno-associated virus 2 [sequence omitted]

SEQ ID NO: 218 - protein, 736 aa, Adeno-associated virus
MAADGYLPDWLEDNLSEGIREWWDLKPGAPKPKANQQKQDDGRGLVLPGYKYLGPFNGLDKGEPVNAADAAALEHDKAYDQQLKAGDNPYLRYNHADAEFQERLQEDTSFGGNLGRAVFQAKKRVLEPLGLVEEGAKTAPGKKRPVEQSPQEPDSSSGIGKKGQQPAKKRLNFGQTGDSESVPDPQPLGEPPAAPSGVGSNTMASGGGAPMADNNEGADGVGNASGNWHCDSTWLGDRVITTSTRTWALPTYNNHLYKQISSQSGASTNDNTYFGYSTPWGYFDFNRFHCHFSPRDWQRLINNNWGFRPKRLNFKLFNIQVKEVTTNDGTTTIANNLTSTVQVFTDSEYQLPYVLGSAHQGCLPPFPADVFMIPQYGYLTLNNGSQAVGRSSFYCLEYFPSQMLRTGNNFQFSYTFEDVPFHSSYAHSQSLDRLMNPLIDQYLYYLSRTQTTSGTAGNRELQFSQAGPSSMANQAKNWLPGPCYRQQRVSKTTNQNNNSNFAWTGATKYHLNGRDSLVNPGPAMATHKDDEDKFFPMSGVLIFGKQGAGNSNVDLDNVMITSEEEIKTTNPVATEEYGTVATNLQSSNTAPATGTVNSQGALPGMVWQDRDVYLQGPIWAKIPHTDGHFHPSPLMGGFGLKHPPPQILIKNTPVPANPPTTFSPAKFASFITQYSTGQVSVEIEWELQKENSKRWNPEIQYTSNYNKSTNVDFAVDTNGVYSEPRPIGTRYLTRNL

SEQ ID NO: 219 - protein, 736 aa, Adeno-associated virus; identical to SEQ ID NO: 143

SEQ ID NO: 220 - protein, 736 aa, Adeno-associated virus; identical to SEQ ID NO: 147

SEQ ID NO: 221 - protein, 736 aa, Adeno-associated virus; identical to SEQ ID NO: 144

SEQ ID NO: 222 - protein, 736 aa, Adeno-associated virus; identical to SEQ ID NO: 146

SEQ ID NO: 223 - protein, 736 aa, Adeno-associated virus; identical to SEQ ID NO: 145

SEQ ID NO: 224 - protein, 736 aa, Adeno-associated virus; identical to SEQ ID NO: 148

SEQ ID NO: 225 - protein, 736 aa, Adeno-associated virus; identical to SEQ ID NO: 149

SEQ ID NO: 226 - protein, 736 aa, Adeno-associated virus; identical to SEQ ID NO: 150

SEQ ID NO: 227 - protein, 736 aa, Adeno-associated virus; identical to SEQ ID NO: 142

SEQ ID NO: 228 - protein, 737 aa, Adeno-associated virus
MAADGYLPDWLEDNLSEGIREWWDLKPGAPKPKANQQKQDDGRGLVLPGYKYLGPFNGLDKGEPVNAADAAALEHDKAYDQQLKAGDNPYLRYNHADAEFQERLQEDTSFGGNLGRAVFQAKKRVLEPLGLVEEGAKTAPGKKRPVEQSPQEPDSSTGIGKKGQQPAKKRLNFGQTGDSESVPDPQPLGEPPAAPSGVGSNTMAAGGGAPMADNNEGADGVGNASGNWHCDSTWLGDRVITTSTRTWALPTYNNHLYKQISNSQSGGSTNDNTYFGYSTPWGYFDFNRFHCHFSPRDWQRLINNNWGFRPKRLNFKLFNIQVKEVTTNDGTTTIANNLTSTVQVFTDSEYQLPYVLGSAHQGCLPPFPADVFMIPQYGYLTLNNGSQAVGRSSFYCLEYFPSQMLRTGNNFEFSYTFEDVPFHSSYAHSQSLDRLMNPLIDQYLYYLSRTQTTGGTAGNRTLQFSQAGPSSMANQAKNWLPGPCYRQQRVSKTTNQNNNSNFAWTGATKYHLNGRDSLVNPGVAMATHKDDEDRFFPSSGVLIFGKQGAGNDNVDLDNVMITSEEEIKTTNPVATEEYGVVATNLQSANTAPQTGTVNSQGALPGMVWQNRDVYLQGPIWAKIPHTDGNFHPSPLMGGFGLKHPPPQILIKNTPVPANPPTTFSPAKFASFITQYSTGQVSVEIEWELQKENSKRWNPEIQYTSNYNKSTNVDFAVDTEGVYSEPRPIGTRYLTRNL

SEQ ID NO: 229 - protein, 738 aa, Adeno-associated virus
MAADGYLPDWLEDNLSEGIREWWDLKPGAPKPKANQQKQDDGRGLVLPGYKYLGPFNGLDKGEPVNAADAAALEHDKAYDQQLKAGDNPYLRYNHADAEFQERLQEDTSFGGNLGRAVFQAKKRVLEPLGLVEEGAKTAPGKKRPVEQSPQREPDSSTGIGKKGQQPAKKRLNFGQTGDSESVPDPQPLGEPPAAPSGVGSNTMAAGGGAPMADNNEGADGVGNSSGNWHCDSTWLGDRVITTSTRTWALPTYNNHLYKQISNGTSGGSTNDNTYFGYSTPWGYFDFNRFHCHFSPRDWQRLINNNWGFRPKRLNFKLFNIQVKEVTTNEGTKTIANNLTSTVQVFTDSEYQLPYVLGSAHQGCLPPFPADVFMIPQYGYLTLNNGSQAVGRSSFYCLEYFPSQMLRTGNNFQFSYTFEDVPFHSSYAHSQSLDRLMNPLIDQYLYYLSRTQTTGGTAGTQTLQFSQAGPSSMANQAKNWLPGPCYRQQRVSTTTNQNNNSNFAWTGATKYHLNGRDSLVNPGVAMATHKDDEDRFFPSSGVLIFGKQGAGNDNVDYSNVMITSEEEIKTTNPVATEEYGVVATNLQSANTAPQTGTVNSQGALPGMVWQNRDVYLQGPIWAKIPHTDGNFHPSPLMGGFGLKHPPPQILIKNTPVPADPPTTFNQAKLNSFITQYSTGQVSVEIEWELQKENSKRWNPEIQYTSNYYKSTNVDFAVNTEGVYSEPRPIGTRYLTRNL

SEQ ID NO: 230 - protein, 738 aa, Adeno-associated virus; identical to SEQ ID NO: 151

SEQ ID NO: 231 - protein, 738 aa, Adeno-associated virus
MAADGYLPDWLEDNLSEGIREWWDLKPGAPKPKANQQKQDDGRGLVLPGYKYLGPFNGLDKGEPVNAADAAALEHDKAYDQQLKAGDNPYLRYNHADAEFQERLQEDTSFGGNLGRAVFQAKKRVLEPLGLVEEGAKTAPGKKRPVEQSPQREPDSSTGIGKKGQQPARKRLNFGQTGDSESVPDPQPLGEPPAAPSGVGSNTMAAGGGAPMADNNEGADGVGSSSGNWHCDSTWLGDRVITTSTRTWALPTYNNHLYKQISNGTSGGSTNDNTYFGYSTPWGYFDFNRFHCHFSPRDWQRLINNNWGFRPKRLNFKLFNIQVKEVTQNEGTKTIANNLTSTIQVFTDSEYQLPYVLGSAHQGCLPPFPADVFMIPQYGYLTLNNGSQAVGRSSFYCLEYFPSQMLRTGNNFQFSYTFEDVPFHSSYAHSQSLDRLMNPLIDQYLYYLSRTQTTGGTAGTQTLQFSQAGPSNMANQAKNWLPGPCYRQQRVSTTTSQNNNSNFAWTGATKYHLNGRDSLVNPGVAMATHKDDEDRFFPSSGILIFGKQGAGKDNVDYSNVMLTSEEEIKTTNPVATEEYGVVADNLQQQNTAPQIGTVNSQGALPGMVWQNRDVYLQGPIWAKIPHTDGNFHPSPLMGGFGLKHPPPQILIKNTPVPADPPTTFNQAKLNSFITQYSTGQVSVEIEWELQKENSKRWNPEIQYTSNYYKSTNVDFAVNTEGVYSEPRPIGTRYLTRNL

SEQ ID NO: 232 - protein, 738 aa, Adeno-associated virus
MAADGYLPDWLEDNLSEGIREWWDLKPGAPKPKANQQKQDDGRGLVLPGYKYLGPFNGLDKGEPVNAADAAALEHDKAYDQQLKAGDNPYLRYNHADAEFQERLQEDTSFGGNLGRAVFQAKKRVLEPLGLVEEGAKTAPGKKRPVEPSPQRSPDSSTGIGKKGQQPARKRLNFGQTGDSESVPDPQPIGEPPAAPSGVGSGTMAAGGGAPMADNNEGADGVGSSSGNWHCDSTWLGDRVITTSTRTWALPTYNNHLYKQISNGTSGGSTNDNTYFGYSTPWGYFDFNRFHCHFSPRDWQRLINNNWGFRPKRLNFKLFNIQVKEVTQNEGTKTIANNLTSTIQVFTDSEYQLPYVLGSAHQGCLPPFPADVFMIPQYGYLTLNNGSQAVGRSSFYCLEYFPSQMLRTGNNFEFSYTFEDVPFHSSYAHSQSLDRLMNPLIDQYLYYLSRTQSTGGTAGTQQLLFSQAGPSNMSAQAKNWLPGPCYRQQRVSTTLSQNNNSNFAWTGATKYHLNGRDSLVNPGVAMATHKDDEDRFFPSSGILMFGKQGAGKDNVDYSNVMLTSEEEIKTTNPVATEQYGVVADNLQQQNTAPIVGAVNSQGALPGMVWQNRDVYLQGPIWAKIPHTDGNFHPSPLMGGFGLKHPPPQILIKNTPVPADPPTTFNQAKLNSFITQYSTGQVSVEIEWELQKENSKRWNPEIQYTSNYYKSTNVDFAVNTEGVYSEPRPIGTRYLTRNL

SEQ ID NO: 233 - protein, 738 aa, Adeno-associated virus
MAADGYLPDWLEDNLSEGIREWWDLKPGAPKPKANQQKQDDGRGLVLPGYKYLGPFNGLDKGEPVNAADAAALEHDKAYDQQLKAGDNPYLRYNHADAEFQERLQEDTSFGGNLGRAVFQAKKRVLEPLGLVEEGAKTAPGKKRPVEPSPQRSPDSSTGIGKKGQQPAKKRLNFGQTGDSESVPDPQPIGEPPAGPSGLGSGTMAAGGGAPMADNNEGADGVGSSSGNWHCDSTWLGDRVITTSTRTWALPTYNNHLYKQISNGTSGGSTNDNTYFGYSTPWGYFDFNRFHCHFSPRDWQRLINNNWGFRPKRLNFKLFNIQVKEVTQNEGTKTIANNLTSTIQVFTDSEYQLPYVLGSAHQGCLPPFPADVFMIPQYGYLTLNNGSQAVGRSSFYCLEYFPSQMLRTGNNFEFSYTFEDVPFHSSYAHSQSLDRLMNPLIDQYLYYLSRTQSTGGTAGTQQLLFSQAGPSNMSAQAKNWLPGPCYRQQRVSTTLSQNNNSNFAWTGATKYHLNGRDSLVNPGVAMATHKDDEERFFPSSGVLMFGKQGAGKDNVDYSSVMLTSEEEIKTTNPVATEQYGVVADNLQQQNTAPIVGAVNSQGALPGMVWQNRDVYLQGPIWAKIPHTDGNFHPSPLMGGFGLKHPPPQILIKNTPVPADPPTTFSQAKLASFITQYSTGQVSVEIEWELQKENSKRWNPEIQYTSNYYKSTNVDFAVNTEGTYSEPRPIGTRYLTRNL

SEQ ID NO: 234 - protein, 736 aa, Adeno-associated virus
MAADGYLPDWLEDNLSEGIREWWDLKPGAPKPKANQQKQDDGRGLVLPGYKYLGPFNGLDKGEPVNAADAAALEHDKAYDQQLKAGDNPYLRYNHADAEFQERLQEDTSFGGNLGRAVFQAKKRVLEPLGLVEEGAKTAPGKKRPVEQSPQEPDSSSGIGKTGQQPAKKRLNFGQTGDSESVPDPQPLGEPPAAPSGVGSNTMASGGGAPMADNNEGADGVGNSSGNWHCDSTWLGDRVITTSTRTWALPTYNNHLYKQISNGTSGGSTNDNTYFGYSTPWGYFDFNRFHCHFSPRDWQRLINNNWGFRPKRLNFKLFNIQVKEVTTNEGTKTIANNLTSTVQVFTDSEYQLPYVLGSAHQGCLPPFPADVFMIPQYGYLTLNNGSQAVGRSSFYCLEYFPSQMLRTGNNFQFSYTFEDVPFHSSYAHSQSLDRLMNPLIDQYLYYLSRTQTTGTAGTQTLQFSQAGPSSMANQARNWVPGPCYRQQRVSTTTNQNNNSNFAWTGATKYHLNGRDSLMNPGVAMASHKDDEDRFFPSSGVLIFGKQGAGNDNVDYSQVMITNEEEIKTTNPVATEEYGAVATNNQSANTQAQTGLVHNQGVLPGMVWQNRDVYLQGPIWAKIPHTDGNFHPSPLMGGFGLKHPPPQILIKNTPVPADPPTTFNQAKLNSFITQYSTGQVSVEIEWELQKENSKRWNPEIQYTSNYYKSTNVDFAVNTEGVYSEPRPIGTRYLTRNL

SEQ ID NO: 235 - protein, 737 aa, Adeno-associated virus
MAADGYLPDWLEDNLSEGIREWWDLKPGAPKPKANQQKQDDGRGLVLPGYKYLGPFNGLDKGEPVNAADAAALEHDKAYDQQLKAGDNPYLRYNHADAEFQERLQEDTSFGGNLGRAVFQAKKRVLEPLGLVEEGAKTAPGKKRPVEPSPQRSPDSSTGIGKKGQQPAKKRLNFGQTGDSESVPDPQPLGEPPAAPSGVGSGTMAAGGGAPMADNNEGADGVGNASGNWHCDSTWLGDRVITTSTRTWALPTYNNHLYKQISSQSAGSTNDNTYFGYSTPWGYFDFNRFHCHFSPRDWQRLINNNWGFRPKKLRFKLFNIQVKEVTTNDGVTTIANNLTSTVQVFSDSEYQLPYVLGSAHQGCLPPFPADVFMIPQYGYLTLNNGSQSVGRSSFYCLEYFPSQMLRTGNNFEFSYTFEDVPFHSSYAHSQSLDRLMNPLIDQYLYYLARTQSTTGGTAGNRELQFYQAGPSTMAEQAKNWLPGPCYRQQRVSKTLDQNNNSNFAWTGATKYHLNGRNSLVNPGVAMATHKDDEDRFFPSSGVLIFGKTGAANKTTLENVLMTNEEEIKTTNPVATEEYGVVSSNLQSANTAPQTQTVNSQGALPGMVWQNRDVYLQGPIWAKIPHTDGNFHPSPLMGGFGLKHPPPQILIKNTPVPANPPEVFTPAKFASFITQYSTGQVSVEIEWELQKENSKRWNPEIQYTSNYDKSTNVDFAVDSEGVYSEPRPIGTRYLTRNL

SEQ ID NO: 236 - protein, 735 aa, Adeno-associated virus
MAADGYLPDWLEDNLSEGIREWWDLKPGAPKPKANQQKQDDGRGLVLPGYKYLGPFNGLDKGEPVNAADAAALEHDKAYDQQLKAGDNPYLRYNHADAEFQERLQEDTSFGGNLGRAVFQAKKRVLEPLGLVEEGAKTAPGKKRPVEQSPQEPDSSSGIGKSGQQPAKKRLNFGQTGDSESVPDPQPLGEPPAAPSGVGSNTMASGGGAPMADNNEGADGVGNASGNWHCDSTWLGDRVITTSTRTWALPTYNNHLYKQISSQSGASNDNHYFGYSTPWGYFDFNRFHCHFSPRDWQRLINNNWGFRPKRLNFKLFNIQVKEVTTNDGTTTIANNLTSTVQVFTDSEYQLPYVLGSAHQGCLPPFPADVFMIPQYGYLTLNNGSQAVGRSSFYCLEYFPSQMLRTGNNFTFSYTFEDVPFHSSYAHSQSLDRLMNPLIDQYLYYLSRTQTTSGTAQNRELQFSQAGPSSMANQAKNWLPGPCYRQQRVSKTANDNNNSNFAWTGATKYHLNGRDSLVNPGPAMASHKDDEDKFFPMSGVLIFGKQGAGASNVDLDNVMITDEEEIKTTNPVATEQYGTVATNLQSSNTAPATGTVNSQGALPGMVWQDRDVYLQGPIWAKIPHTDGHFHPSPLMGGFGLKHPPPQILIKNTPVPANPPTTFSPAKFASFITQYSTGQVSVEIEWELQKENSKRWNPEIQYTSNYNKSANVDFTVDTNGVYSEPRPIGTRYLTRNL

SEQ ID NO: 237 - protein, 735 aa, Adeno-associated virus
MAADGYLPDWLEDNLSEGIREWWDLKPGAPQPKANQQHQDDGRGLVLPGYKYLGPFNGLDKGEPVNEADAAALEHDKAYDQQLKAGDNPYLKYNHADAEFQERLQEDTSFGGNLGRAVFQAKKRVLEPLGLVEEAAKTAPGKKRPVEQSPQEPDSSSGIGKSGQQPARKRLNFGQTGDSESVPDPQPLGEPPAAPSGVGSNTMASGGGAPMADNNEGADGVGNSSGNWHCDSTWLGDRVITTSTRTWALPTYNNHLYKQISSQSGASNDNHYFGYSTPWGYFDFNRFHCHFSPRDWQRLINNNWGFRPKKLNFKLFNIQVKEVTQNDGTTTIANNLTSTVQVFTDSEYQLPYVLGSAHQGCLPPFPADVFMIPQYGYLTLNNGSQAVGRSSFYCLEYFPSQMLRTGNNFTFSYTFEDVPFHSSYAHSQSLDRLMNPLIDQYLYYLSRTQTTSGTTQQSRLQFSQAGPSSMAQQAKNWLPGPCYRQQRVSKTANDNNNSNFAWTGATKYHLNGRDSLVNPGPAMASHKDDEEKFFPMHGVLIFGKQGTGASNVDLDNVMITDEEEIRTTNPVATEQYGTVATNLQSSNTAPATGTVNSQGALPGMVWQDRDVYLQGPIWAKIPHTDGHFHPSPLMGGFGLKHPPPQILIKNTPVPANPPTTFSPAKFASFITQYSTGQVSVEIEWELQKENSKRWNPEIQYTSNYNKSVNVDFTVDTNGVYSEPRPIGTRYLTRNL

What is claimed is:

1. A modified adeno-associated virus (AAV) capsid protein, comprising:
(i) a reference AAV capsid protein, and
(ii) a 7-mer peptide having the sequence RGDLLLS (SEQ ID NO: 1) inserted into a site within VR VIII of the reference AAV capsid protein.

2. The modified AAV capsid protein of claim 1, wherein the AAV capsid protein is selected from one or more of VP1, VP2 and VP3.

3. The modified AAV capsid protein of claim 1 or claim 2, wherein the reference AAV capsid protein is a capsid protein of an AAV variant selected from the group consisting of: AAV2; AAV1; AAV6; AAV3; AAV LK03; AAV7; AAV8; AAV hu.37; AAV rh.10; AAV9; AAV hu.68; AAV10; AAV5; AAV3-3; AAV4-4; AAV1-A; hu.46-A; hu.48-A; hu.44-A; hu.43-A; AAV6-A; hu.34-B; hu.47-B; hu.29-B; rh.63-B; hu.56-B; hu.45-B; rh.57-B; rh.35-B; rh.58-B; rh.28-B; rh.51-B; rh.19-B; rh.49-B; rh.52-B; rh.13-B; AAV2-B; rh.20-B; rh.24-B; rh.64-B; hu.27-B; hu.21-B; hu.22-B; hu.23-B; hu.7-C; hu.61-C; rh.56-C; hu. 9-C; hu.54-C; hu.53-C; hu.60-C; hu.55-C; hu.2-C; hu.1-C; hu.18-C; hu.3-C; hu.25-C; hu.15-C; hu.16-C; hu.11-C; hu.10-C; hu.4-C; rh.54-D; rh.48-D; rh.55-D; rh.62-D; AAV7-D; rh.52-E; rh.51-E; hu.39-E; rh.53-E; hu.37-E; rh.43-E; rh.50-E; rh.49-E; rh.61-E; hu.41-E; rh.64-E; rh74; hu.42-E; rh.57-E; rh.40-E; hu.67-E; hu.17-E; hu.6-E; hu.66-E; rh.38-E; hu.32-F; AAV9/hu; hu.31-F; Anc80; Anc81; Anc82; Anc83; Anc84; Anc94; Anc113; Anc126; Anc127; Anc80L27; Anc80L59; Anc80L60; Anc80L62; Anc80L65; Anc80L33; Anc80L36; Anc80L44; Anc80L1; Anc110; and Anc80DI.

4. The modified AAV capsid protein of claim 1 or claim 2, wherein the reference AAV capsid protein is a capsid protein having a sequence selected from SEQ ID Nos: 54-152 or a fragment thereof.

5. The modified AAV capsid protein of any one of claims 1-4, wherein the 7-mer peptide is inserted into an amino acid position between 565 and 595 of the reference AAV capsid protein.

6. The modified AAV capsid protein of any one of claims 1-4, wherein:
(i) the reference AAV capsid protein is a capsid protein of AAV1 and the 7-mer peptide is inserted between D590 and P591 or between S588 and T589 of the capsid protein;
(ii) the reference AAV capsid protein is a capsid protein of AAV2 and the 7-mer peptide is inserted between R588 and Q589 or between N587 and R588 of the capsid protein;
(iii) the reference AAV capsid protein is a capsid protein of AAV3b and the 7-mer peptide is inserted between S586 and S587 or between N588 and T589 of the capsid protein;
(iv) the reference AAV capsid protein is a capsid protein of AAV4 and the 7-mer peptide is inserted between S584 and N585 or between S586 and N587 of the capsid protein;
(v) the reference AAV capsid protein is a capsid protein of AAV5 and the 7-mer peptide is inserted between S575 and S576 or between T577 and T578 of the capsid protein;
(vi) the reference AAV capsid protein is a capsid protein of AAV6 and the 7-mer peptide is inserted between D590 and P591 or S588 and T589 of the capsid protein;
(vii) the reference AAV capsid protein is a capsid protein of AAV7 and the 7-mer peptide is inserted between N589 and T590 of the capsid protein;
(viii) the reference AAV capsid protein is a capsid protein of AAV8 and the 7-mer peptide is inserted between N590 and T591 of the capsid protein;
(ix) the reference AAV capsid protein is a capsid protein of AAV9 and the 7-mer peptide is inserted between Q588 and A589 of the capsid protein;
(x) the reference AAV capsid protein is a capsid protein of AAVrh10 and the 7-mer peptide is inserted between N590 and A591 of the capsid protein;
(xi) the reference AAV capsid protein is a capsid protein of AAVpo.1 and the 7-mer peptide is inserted between N567 and S568 or between N569 and T570 of the capsid protein; or
(xii) the reference AAV capsid protein is a capsid protein of AAV12 and the 7-mer peptide is inserted between N592 and A593 or between T594 and T595 of the capsid protein.

7. The modified AAV capsid protein of any one of claims 1-6, having the sequence of SEQ ID NO: 158.

8. The modified AAV capsid protein according to claim 1, wherein the reference AAV capsid protein is a liver-toggle mutant of a capsid protein of an AAV variant selected from the group consisting of: AAV2; AAV1; AAV6; AAV3; AAV LK03; AAV7; AAV8; AAV hu.37; AAV rh.10; AAV9; AAV hu.68; AAV10; AAV5; AAV3-3; AAV4-4; AAV1-A; hu.46-A; hu.48-A; hu.44-A; hu.43-A; AAV6-A; hu.34-B; hu.47-B; hu.29-B; rh.63-B; hu.56-B; hu.45-B; rh.57-B; rh.35-B; rh.58-B; rh.28-B; rh.51-B; rh.19-B; rh.49-B; rh.52-B; rh.13-B; AAV2-B; rh.20-B; rh.24-B; rh.64-B; hu.27-B; hu.21-B; hu.22-B; hu.23-B; hu.7-C; hu.61-C; rh.56-C; hu. 9-C; hu.54-C; hu.53-C; hu.60-C; hu.55-C; hu.2-C; hu.1-C; hu.18-C; hu.3-C; hu.25-C; hu.15-C; hu.16-C; hu.11-C; hu.10-C; hu.4-C; rh.54-D; rh.48-D; rh.55-D; rh.62-D; AAV7-D; rh.52-E; rh.51-E; hu.39-E; rh.53-E; hu.37-E; rh.43-E; rh.50-E; rh.49-E; rh.61-E; hu.41-E; rh.64-E; rh74; hu.42-E; rh.57-E; rh.40-E; hu.67-E; hu.17-E; hu.6-E; hu.66-E; rh.38-E; hu.32-F; AAV9/hu; hu.31-F; Anc80; Anc81; Anc82; Anc83; Anc84; Anc94; Anc113; Anc126; Anc127; Anc80L27; Anc80L59; Anc80L60; Anc80L62; Anc80L65; Anc80L33; Anc80L36; Anc80L44; Anc80L1; Anc110; and Anc80DI.

9. The modified AAV capsid protein according to claim 1, wherein the reference AAV capsid protein is a liver-toggle mutant of a capsid protein having a sequence selected from SEQ ID Nos: 54-152 or a fragment thereof.

10. The modified AAV capsid protein of claim 8 or 9, comprising: an alanine (A) amino acid residue at an amino acid position corresponding to position 266 in Anc80; or a lysine (K) amino acid residue at an amino acid position corresponding to position 168 in Anc80.

11. The modified AAV capsid protein of claim 8 or 9, wherein the reference AAV capsid protein is a liver toggle mutant of a capsid protein of AAV9 comprising an alanine (A) amino acid residue at an amino acid position 267 and a threonine (T) amino acid residue at an amino acid position 269.

12. The modified protein of claim 11, comprising the sequence of SEQ ID NO: 159.

13. A modified adeno-associated virus (AAV) capsid protein, comprising:
(i) a liver-toggle mutant of a reference AAV capsid protein, comprising
a) an alanine (A) or glycine (G) amino acid residue at an amino acid position corresponding to position 266 in Anc80; or
b) a lysine (K) or arginine (R) amino acid residue at an amino acid position corresponding to position 168 in Anc80; and
(ii) a targeting peptide inserted into a site within VR VIII of the liver-toggle mutant.

14. The modified AAV capsid protein of claim 13, wherein the liver-toggle mutant comprises:
a) an alanine (A) amino acid residue at an amino acid position corresponding to position 266 in Anc80; or
b) a lysine (K) amino acid residue at an amino acid position corresponding to position 168 in Anc80.

15. The modified AAV capsid protein of claim 14, wherein the liver-toggle mutant comprises:
a) an alanine (A) amino acid residue at an amino acid position corresponding to position 266 in Anc80; and
b) a lysine (K) amino acid residue at an amino acid position corresponding to position 168 in Anc80.

16. The modified AAV capsid protein of claim 13, wherein the liver-toggle mutant comprises:
a) a glycine (G) amino acid residue at an amino acid position corresponding to position 266 in Anc80; or
b) an arginine (R) amino acid residue at an amino acid position corresponding to position 168 in Anc80.

17. The modified AAV capsid protein of claim 14, wherein the liver-toggle mutant comprises:
a) a glycine (G) amino acid residue at an amino acid position corresponding to position 266 in Anc80; and
b) an arginine (R) amino acid residue at an amino acid position corresponding to position 168 in Anc80.

18. The modified AAV capsid protein of claim 13-17, wherein the targeting peptide is 7-mer peptide having the sequence RGDX¹X²X³X⁴ (SEQ ID NO: 52), wherein X¹ to X⁴ are independently selected amino acid residues.

19. The modified AAV capsid protein of claim 18, wherein X¹, X², and X³ are independently selected from L, G, V, and A; and X⁴ is selected from S, V, A, G, and L.

20. The modified AAV capsid protein of any one of claims 18-19, wherein X¹, X², and X³ are independently selected from L, V, and A; and at least two of X¹, X², and X³ are independently L.

21. The modified AAV capsid protein of any one of claims 18-20, wherein, X² is L.

22. The modified AAV capsid protein of claim 18, wherein 7-mer peptide has a sequence of RGDLLLS (SEQ ID NO: 1).

23. The modified AAV capsid protein of any one of claims 13-15, wherein the targeting peptide is the 7-mer peptide TLAVPFK (SEQ ID NO: 53).

24. The modified AAV capsid protein of any one of claims 13-15, wherein the targeting peptide is a peptide having a sequence selected from SEQ ID Nos: 2-51 and 53.

25. The modified AAV capsid protein of any one of claims 13-24, wherein the reference AAV capsid protein is a capsid protein of an AAV variant selected from the group consisting of: AAV2; AAV1; AAV6; AAV3; AAV LK03; AAV7; AAV8; AAV hu.37; AAV rh.10; AAV9; AAV hu.68; AAV10; AAV5; AAV3-3; AAV4-4; AAV1-A; hu.46-A; hu.48-A; hu.44-A; hu.43-A; AAV6-A; hu.34-B; hu.47-B; hu.29-B; rh.63-B; hu.56-B; hu.45-B; rh.57-B; rh.35-B; rh.58-B; rh.28-B; rh.51-B; rh.19-B; rh.49-B; rh.52-B; rh.13-B; AAV2-B; rh.20-B; rh.24-B; rh.64-B; hu.27-B; hu.21-B; hu.22-B; hu.23-B; hu.7-C; hu.61-C; rh.56-C; hu. 9-C; hu.54-C; hu.53-C; hu.60-C; hu.55-C; hu.2-C; hu.1-C; hu.18-C; hu.3-C; hu.25-C; hu.15-C; hu.16-C; hu.11-C; hu.10-C; hu.4-C; rh.54-D; rh.48-D; rh.55-D; rh.62-D; AAV7-D; rh.52-E; rh.51-E; hu.39-E; rh.53-E; hu.37-E; rh.43-E; rh.50-E; rh.49-E; rh.61-E; hu.41-E; rh.64-E; rh74; hu.42-E; rh.57-E; rh.40-E; hu.67-E; hu.17-E; hu.6-E; hu.66-E; rh.38-E; hu.32-F; AAV9/hu; hu.31-F; Anc80; Anc81; Anc82; Anc83; Anc84; Anc94; Anc113; Anc126; Anc127; Anc80L27; Anc80L59; Anc80L60; Anc80L62; Anc80L65; Anc80L33; Anc80L36; Anc80L44; Anc80L1; Anc110; and Anc80DI.

26. The modified AAV capsid protein of any one of claims 13-24, wherein the reference AAV capsid protein is a capsid protein having a sequence selected from SEQ ID Nos: 54-152 or a fragment thereof.

27. The modified AAV capsid protein of claim 25 or 26, wherein the reference AAV capsid protein is an AAV9 capsid protein.

28. The modified AAV capsid protein of claim 27, wherein the liver-toggle mutant comprises an alanine (A) amino acid residue at position 267.

29. The modified AAV capsid protein of any one of claims 27-28, wherein the liver-toggle mutant comprises a threonine (T) amino acid residue at position 269.

30. The modified AAV capsid protein of claim 27, comprising an alanine (A) amino acid residue at position 267 and a threonine (T) amino acid residue at position 269.

31. The modified AAV capsid protein of any one of claims 13-30, wherein the targeting peptide is inserted into an amino acid position between 565 and 595 of the liver toggle mutant.

32. The modified AAV capsid protein of claim 31, wherein:
(i) the reference AAV capsid protein is a capsid protein of AAV1 and the targeting peptide is inserted between D590 and P591 or between S588 and T589 of the liver-toggle mutant;
(ii) the reference AAV capsid protein is a capsid protein of AAV2 and the targeting peptide is inserted between R588 and Q589 or between N587 and R588 of the liver-toggle mutant;
(iii) the reference AAV capsid protein is a capsid protein of AAV3b and the targeting peptide is inserted between S586 and S587 or between N588 and T589 of the liver-toggle mutant;
(iv) the reference AAV capsid protein is a capsid protein of AAV4 and the targeting peptide is inserted between S584 and N585 or between S586 and N587 of the liver-toggle mutant;
(v) the reference AAV capsid protein is a capsid protein of AAV5 and the targeting peptide is inserted between S575 and S576 or between T577 and T578 of the liver-toggle mutant;
(vi) the reference AAV capsid protein is a capsid protein of AAV6 and the targeting peptide is inserted between D590 and P591 or S588 and T589 of the liver-toggle mutant;
(vii) the reference AAV capsid protein is a capsid protein of AAV7 and the targeting peptide is inserted between N589 and T590 of the liver-toggle mutant;
(viii) the reference AAV capsid protein is a capsid protein of AAV8 and the targeting peptide is inserted between N590 and T591 of the liver-toggle mutant;
(ix) the reference AAV capsid protein is a capsid protein of AAV9 and the targeting peptide is inserted between Q588 and A589 of the liver-toggle mutant;
(x) the reference AAV capsid protein is a capsid protein of AAVrh10 and the targeting peptide is inserted between N590 and A591 of the liver-toggle mutant;
(xi) the reference AAV capsid protein is a capsid protein of AAVpo. 1 and the targeting peptide is inserted between N567 and S568 or between N569 and T570 of the liver-toggle mutant; or
(xii) the reference AAV capsid protein is a capsid protein of AAV12 and the targeting peptide is inserted between N592 and A593 or between T594 and T595 of the liver-toggle mutant.

33. The modified AAV capsid protein of any one of claims 13-32, wherein the liver-toggle mutant comprises a sequence selected from NSTSGASS (SEQ ID NO. 160), NSTSGGST (SEQ ID NO. 161) and NSTSGAST (SEQ ID NO. 162).

34. The modified AAV capsid protein of any one of claims 13-33, wherein the liver-toggle mutant of a reference AAV capsid protein, comprising:
a) an alanine (A) amino acid residue at an amino acid position corresponding to position 266 in Anc80; and
b) a lysine (K) amino acid residue at an amino acid position corresponding to position 168 in Anc80

35. The modified AAV capsid protein of any one of claims 13-33, wherein the liver-toggle mutant of a reference AAV capsid protein, comprising
a) an alanine (A) amino acid residue at an amino acid position corresponding to position 267 in AAV9; and
b) a threonine (T) amino acid residue at an amino acid position corresponding to position 269 in AAV9.

36. The modified AAV capsid protein of any one of claims 13-33, wherein the liver-toggle mutant further comprises
a) an alanine (A) amino acid residue at an amino acid position corresponding to position 504 in AAV9; and
b) an alanine (A) amino acid residue at an amino acid position corresponding to position 505 in AAV9.

37. The modified AAV capsid protein of any one of claims 13-36, having a sequence of SEQ ID NO: 159.

38. A polynucleotide encoding the modified AAV capsid protein of any one of claims 1 to 37.

39. A vector comprising the polynucleotide of claim 38.

40. The vector of claim 39, further comprising a promoter operably linked to the polynucleotide.

41. A host cell comprising the modified AAV capsid protein of any one of claims 1 to 37, the polynucleotide specified in claim 38, or the vector of claim 39 or 40.

42. A recombinant AAV virion (rAAV) comprising the modified AAV capsid protein of any one of claims 1 to 37.

43. The AAV virion of claim 42, further comprising an exogenous polynucleotide.

44. The AAV virion of claim 43, wherein the exogenous polynucleotide comprises a template for homology directed repair.

45. The AAV virion of claim 43, wherein the exogenous polynucleotide comprises an expressible polynucleotide encoding a therapeutic tRNA, miRNA, gene editing guide RNA, or RNA-editing guide RNA.

46. The AAV virion of claim 43, wherein the exogenous polynucleotide comprises an expressible polynucleotide encoding a therapeutic protein.

47. The AAV virion of claim 46, wherein the therapeutic protein is MTM1 or a fragment thereof.

48. The AAV virion of claim 47, wherein the expressible polypeptide comprises the sequence of SEQ ID NO: 165 or a fragment thereof.

49. The AAV virion of claim 47, wherein the expressible polypeptide comprises the sequence having at least 80%, 85%, 90%, 95%, 98%, 99% or 100% sequence identity to any of SEQ ID Nos: 166-170.

50. The AAV virion of any one of claims 43-49, wherein the exogenous polynucleotide further comprises a regulatory sequence.

51. The AAV virion of claim 50, wherein the regulatory sequence comprises expression regulatory elements (EREs).

52. The AAV virion of claim 51, wherein the EREs comprise a CAG promoter.

53. The AAV virion of claim 51, wherein the EREs comprise a sequence having at least 90%, at least 95%, at least 98%, at least 99% or 100% sequence identity to any one of SEQ IDs NO:171-173.

54. A pharmaceutical composition comprising the modified AAV capsid protein of any one of claims 1 to 37 or the AAV virion of any one of claims 42-53.

55. A method for treating or ameliorating or preventing a disease or condition in a subject, comprising administering a therapeutically effective amount of the AAV virion of claim 42 or the pharmaceutical composition of claim 54.

56. The method of treating or ameliorating or preventing a disease according to claim 55, wherein the disease is a muscular disease and/or the condition is muscle degeneration.

57. The method of treating or ameliorating or preventing a disease according to claim 56, wherein said muscle is a striated muscle, preferably heart or a skeletal muscle or diaphragm.

58. The method of treating or ameliorating or preventing a disease according to claim 57, wherein said muscular disease is a muscular dystrophy, a cardiomyopathy, a myotonia, a muscular atrophy, a myoclonus dystonia, a mitochondrial myopathy, a rhabdomyolysis, a fibromyalgia, and/or a myofascial pain syndrome.

59. The modified adeno-associated virus (AAV) capsid protein of any one of claims 1-37, for use in treating and/or preventing a muscular disease and/or muscle degeneration.

60. An AAV virion comprising the modified AAV capsid protein of any one of claims 1-37 or the AAV virion of any one of claims 42-53 for use in treating and/or preventing a muscular disease and/or in muscle regeneration.

61. A pharmaceutical composition comprising the modified AAV capsid protein of any one of claims 1 to 34, and/or the AAV virion specified in any one of claims 42-53 for use in treating and/or preventing a muscular disease and/or in muscle regeneration.

62. A method of transferring an exogenous polynucleotide into a muscle cell, comprising the step of administering the AAV virion specified in any one of claims 42-53 to a subject.

63. The method of claim 62, wherein the administration results in transfer of the exogenous polynucleotide in the muscle cell, at a muscle:liver infection ratio of greater than 1 when measured by genome copies of the AAV virion.

64. The method of claim 62, wherein the muscle:liver infection ratio ranges from 1 to 100.

65. The method of claim 63, wherein the muscle:liver infection ration ranges from 1 to 10.

66. The method of claim 65, wherein the muscle:liver infection ratio ranges from 2 to 8.

67. The method of any one of claims 62-66, wherein the administration results in expression of the exogenous polynucleotide in the muscle cell, at a muscle:liver expression ratio of greater than 10.

68. The method of claim 67, wherein the muscle:liver expression ratio ranges from 10 to 100.

69. The method of claim 68, wherein the muscle:liver expression ratio ranges from 20 to 80.

70. The method of any one of claims 62-69, wherein the muscle:liver expression ratio ranges from 50 to 80 when measured by mRNA transcript expression.

71. The method of any one of claims 62-70, wherein the muscle:liver expression ratio ranges from 10 to 50 when measured by protein expression.

72. The method of any one of claims 62-71, wherein the muscle cell is selected from triceps surae, biceps, heart and quadricep.

73. Use of the AAV capsid polypeptide of any one of claims 1 to 34, and/or the AAV virion specified in any one of claims 42-53 for transferring an exogenous polynucleotide into a muscle cell.

74. The use according to claim 73, wherein said use is a non-therapeutic use, preferably wherein said use is an in vitro use.

75. The use according to claim 73, wherein the muscle cell is selected from triceps surae, biceps, heart and quadricep.

76. A recombinant adeno-associated virus (rAAV), comprising:
a. a genome comprising an MTM1 coding sequence operably linked to an expression regulatory element (ERE); and
b. one, two or all three of the following features:
i. the ERE is a hybrid expression regulatory element (ERE) comprising a CMV enhancer and a chicken beta actin promoter operably linked to the MTM1 coding sequence; and/or
ii. the rAAV comprises a modified AAV capsid protein comprising at least one liver-toggle mutation and/or one muscle-targeting element; and/or
iii. the MTM1 coding sequence is codon optimized for expression in human cells, optionally wherein the coding sequence has at least 90%, at least 95%, at least 98% or at least 99% sequence identity to any one of SEQ ID NOS:167 to 170.

77. The rAAV of claim 76, wherein the MTM1 sequence encodes a protein comprising an amino acid sequence having at least 95% sequence identity to the amino acid sequence of SEQ ID NO:164.

78. The rAAV of claim 77, wherein the MTM1 protein comprises an amino acid sequence having at least 98% or at least 99% sequence identity to the amino acid sequence of SEQ ID NO:164.

79. The rAAV of claim 78, wherein the MTM1 protein comprises an amino acid sequence having 100% sequence identity to the amino acid sequence of SEQ ID NO:164.

80. The rAAV of claim any one of claims 76 to 79, wherein the MTM1 sequence encodes a protein comprising an amino acid sequence having at least 95% sequence identity to the amino acid sequence of SEQ ID NO:165.

81. The rAAV of claim 80, wherein the MTM1 protein comprises an amino acid sequence having at least 98% sequence identity to the amino acid sequence of SEQ ID NO:165.

82. The rAAV of claim 81, wherein the MTM1 protein comprises an amino acid sequence having at least 99% sequence identity to the amino acid sequence of SEQ ID NO:165.

83. The rAAV of claim 82, wherein the MTM1 protein comprises an amino acid sequence having 100% sequence identity to the amino acid sequence of SEQ ID NO:165.

84. The rAAV of any one of claims 76 to 83, wherein the MTM1 coding sequence comprises a nucleotide sequence having at least 90% sequence identity to SEQ ID NO 166.

85. The rAAV of claim 84, wherein the MTM1 coding sequence comprises a nucleotide sequence having at least 95% sequence identity to SEQ ID NO: 166.

86. The rAAV of claim 85, wherein the MTM1 coding sequence comprises a nucleotide sequence having at least 98% sequence identity to SEQ ID NO:166.

87. The rAAV of claim 86, wherein the MTM1 coding sequence comprises a nucleotide sequence having at least 99% sequence identity to SEQ ID NO: 166.

88. The rAAV of claim 84, wherein the MTM1 coding sequence comprises a nucleotide sequence having 100% sequence identity to SEQ ID NO: 166.

89. The rAAV of any one of claims 76 to 88 wherein the MTM1 coding sequence is codon optimized for expression in human cells.

90. The rAAV of claim 89, wherein the MTM1 coding sequence comprises a nucleotide sequence having at least 90% sequence identity to any one of SEQ ID NOS:167 to 170.

91. The rAAV of claim 90, wherein the MTM1 coding sequence comprises a nucleotide sequence having at least 95% sequence identity to any one of SEQ ID NOS:167 to 170.

92. The rAAV of claim 91, wherein the MTM1 coding sequence comprises a nucleotide sequence having at least 98% sequence identity to any one of SEQ ID NOS:167 to 170.

93. The rAAV of claim 92, wherein the MTM1 coding sequence comprises a nucleotide sequence having at least 99% sequence identity to any one of SEQ ID NOS:167 to 170.

94. The rAAV of claim 93, wherein the MTM1 coding sequence comprises a nucleotide sequence having 100% sequence identity to any one of SEQ ID NOS:167 to 170.

95. The rAAV of any one of claims 90 to 94, wherein the sequence identity is to SEQ ID NO:167.

96. The rAAV of any one of claims 90 to 94, wherein the sequence identity is to SEQ ID NO: 168.

97. The rAAV of any one of claims 90 to 94, wherein the sequence identity is to SEQ ID NO: 169.

98. The rAAV of any one of claims 90 to 94, wherein the sequence identity is to SEQ ID NO:169.

99. The rAAV of any one of claims 76 to 98 which comprises a hybrid expression regulatory element (ERE) comprising a CMV enhancer and a chicken beta actin promoter operably linked to the MTM1 coding sequence.

100. The rAAV of claim 99, wherein the ERE comprises (a) a nucleotide sequence having at least 90% sequence identity to SEQ ID NO:171 and a nucleotide sequence having at least 90% sequence identity to SEQ ID NO: 172 or (b) a nucleotide sequence having at least 90% sequence identity to SEQ ID NO: 173.

101. The rAAV of claim 100, wherein the ERE comprises (a) a nucleotide sequence having at least 95% sequence identity to SEQ ID NO:171 and a nucleotide sequence having at least 95% sequence identity to SEQ ID NO:172 or (b) a nucleotide sequence having at least 95% sequence identity to SEQ ID NO:173.

102. The rAAV of claim 100, wherein the ERE comprises (a) a nucleotide sequence having at least 98% sequence identity to SEQ ID NO:171 and a nucleotide sequence having at least 98% sequence identity to SEQ ID NO:172 or (b) a nucleotide sequence having at least 98% sequence identity to SEQ ID NO:173.

103. The rAAV of claim 100, wherein the ERE comprises (a) a nucleotide sequence having at least 99% sequence identity to SEQ ID NO:171 and a nucleotide sequence having at least 99% sequence identity to SEQ ID NO:172 or (b) a nucleotide sequence having at least 99% sequence identity to SEQ ID NO:173.

104. The rAAV of claim 100, (a) a nucleotide sequence having 100% sequence identity to SEQ ID NO: 171 and a nucleotide sequence having 100% sequence identity to SEQ ID NO: 172 or (b) a nucleotide sequence having 100% sequence identity to SEQ ID NO:173.

105. The rAAV of any one of claims 99 to 104, which further comprises a chimeric intron formed from intron sequences derived from chicken beta actin and/or human beta herpes virus and/or human beta globin and/or operably linked to the MTM1 coding sequence.

106. The rAAV of claim 105, wherein the chimeric intron comprises a nucleotide sequence derived from human beta globin, which optionally comprises a nucleotide sequence having at least 90% sequence identity to SEQ ID NO:174.

107. The rAAV of claim 106, wherein the nucleotide sequence derived from human beta globin comprises SEQ ID NO: 174.

108. The rAAV of any one of claims 105 to 107, wherein the chimeric intron comprises a nucleotide sequence derived from human betaherpes virus, which optionally comprises a nucleotide sequence having at least 90% sequence identity to SEQ ID NO:175.

109. The rAAV of claim 108, wherein the nucleotide sequence derived from human betaherpes virus comprises SEQ ID NO:175.

110. The rAAV of claim 105, wherein the chimeric intron is formed from introns from human betaherpes virus and rabbit beta globin.

111. The rAAV of claim 105, wherein the chimeric intron comprises a nucleotide sequence having at least 90% sequence identity to SEQ ID NO:176.

112. The rAAV of claim 111, wherein the chimeric intron comprises a nucleotide sequence having at least 95% sequence identity to SEQ ID NO:176.

113. The rAAV of claim 112, wherein the chimeric intron comprises a nucleotide sequence having at least 98% sequence identity to SEQ ID NO:176.

114. The rAAV of claim 113, wherein the chimeric intron comprises a nucleotide sequence having at least 99% sequence identity to SEQ ID NO:176.

115. The rAAV of claim 114, wherein the chimeric intron comprises a nucleotide sequence having 100% sequence identity to SEQ ID NO: 176.

116. The rAAV of claim 115, wherein the chimeric intron comprises the nucleotide sequence of SEQ ID NO:176.

117. The rAAV of any one of claims 76 to 116, which comprises an unmodified or modified AAV2; AAV1; AAV6; AAV3; AAV LK03; AAV7; AAV8; AAV hu.37; AAV rh.10; AAV9; AAV hu.68; AAV10; AAV5; AAV3-3; AAV4-4; AAV1-A; hu.46-A; hu.48-A; hu.44-A; hu.43-A; AAV6-A; hu.34-B; hu.47-B; hu.29-B; rh.63-B; hu.56-B; hu.45-B; rh.57-B; rh.35-B; rh.58-B; rh.28-B; rh.51-B; rh.19-B; rh.49-B; rh.52-B; rh.13-B; AAV2-B; rh.20-B; rh.24-B; rh.64-B; hu.27-B; hu.21-B; hu.22-B; hu.23-B; hu.7-C; hu.61-C; rh.56-C; hu. 9-C; hu.54-C; hu.53-C; hu.60-C; hu.55-C; hu.2-C; hu.1-C; hu.18-C; hu.3-C; hu.25-C; hu.15-C; hu.16-C; hu.11-C; hu.10-C; hu.4-C; rh.54-D; rh.48-D; rh.55-D; rh.62-D; AAV7-D; rh.52-E; rh.51-E; hu.39-E; rh.53-E; hu.37-E; rh.43-E; rh.50-E; rh.49-E; rh.61-E; hu.41-E; rh.64-E; rh74; hu.42-E; rh.57-E; rh.40-E; hu.67-E hu.17-E; hu.6-E; hu.66-E; rh.38-E; hu.32-F; AAV9/hu; hu.31-F; Anc80; Anc81; Anc82; Anc83; Anc84; Anc94; Anc113; Anc126; Anc127; Anc80L27; Anc80L59; Anc80L60; Anc80L62; Anc80L65; Anc80L33; Anc80L36; Anc80L44; Anc80L1; Anc110; or Anc80DI capsid protein.

118. The rAAV of claim 117, which comprises an unmodified or modified rAAV9 capsid protein.

119. The rAAV of any one of claims 76 to 118 which comprises a VP1, VP2 and/or VP3 capsid protein comprising an amino acid sequence having at least 90% sequence identity to the corresponding protein(s) in AAV2; AAV1; AAV6; AAV3; AAV LK03; AAV7; AAV8; AAV hu.37; AAV rh.10; AAV9; AAV hu.68; AAV10; AAV5; AAV3-3; AAV4-4; AAV1-A; hu.46-A; hu.48-A; hu.44-A; hu.43-A; AAV6-A; hu.34-B; hu.47-B; hu.29-B; rh.63-B; hu.56-B; hu.45-B; rh.57-B; rh.35-B; rh.58-B; rh.28-B; rh.51-B; rh.19-B; rh.49-B; rh.52-B; rh.13-B; AAV2-B; rh.20-B; rh.24-B; rh.64-B; hu.27-B; hu.21-B; hu.22-B; hu.23-B; hu.7-C; hu.61-C; rh.56-C; hu. 9-C; hu.54-C; hu.53-C; hu.60-C; hu.55-C; hu.2-C; hu.61-C; hu.18-C; hu.3-C; hu.25-C; hu.15-C; hu.16-C; hu.11-C; hu.10-C; hu.4-C; rh.54-D; rh.48-D; rh.55-D; rh.62-D; AAV7-D; rh.52-E; rh.51-E hu.39-E; rh.53-E; hu.37-E; rh.43-E; rh.50-E; rh.49-E; rh.61-E; hu.41-E; rh.64-E; rh74; hu.42-E; rh.57-E; rh.40-E; hu.67-E; hu.17-E; hu.6-E; hu.66-E; rh.38-E; hu.32-F; AAV9/hu; hu.31-F; Anc80; Anc81; Anc82; Anc83; Anc84; Anc94; Anc113; Anc126; Anc127; Anc80L27; Anc80L59; Anc80L60; Anc80L62; Anc80L65; Anc80L33; Anc80L36; Anc80L44; Anc80L1; Anc110; or Anc80DI.

120. The rAAV of any one of claims 76 to 119 which comprises a VP1, VP2 and/or VP3 capsid protein comprising an amino acid sequence having at least 95% sequence identity to the corresponding protein(s) in AAV2; AAV1; AAV6; AAV3; AAV LK03; AAV7; AAV8; AAV hu.37; AAV rh.10; AAV9; AAV hu.68; AAV10; AAV5; AAV3-3; AAV4-4; AAV1-A; hu.46-A; hu.48-A; hu.44-A; hu.43-A; AAV6-A; hu.34-B; hu.47-B; hu.29-B; rh.63-B; hu.56-B; hu.45-B; rh.57-B; rh.35-B; rh.58-B; rh.28-B; rh.51-B; rh.19-B; rh.49-B; rh.52-B; rh.13-B; AAV2-B; rh.20-B; rh.24-B; rh.64-B; hu.27-B; hu.21-B; hu.22-B; hu.23-B; hu.7-C; hu.61-C; rh.56-C; hu. 9-C; hu.54-C; hu.53-C; hu.60-C; hu.55-C; hu.2-C; hu.1-C; hu.18-C; hu.3-C; hu.25-C; hu.15-C; hu.16-C; hu.11-C; hu.10-C; hu.4-C; rh.54-D; rh.48-D; rh.55-D; rh.62-D; AAV7-D; rh.52-E; rh.51-E; hu.39-E; rh.53-E; hu.37-E; rh.43-E; rh.50-E; rh.49-E; rh.61-E; hu.41-E; rh.64-E; rh74; hu.42-E; rh.57-E; rh.40-E; hu.67-E; hu.17-E; hu.6-E; hu.66-E; rh.38-E; hu.32-F; AAV9/hu; hu.31-F; Anc80; Anc81; Anc82; Anc83; Anc84; Anc94; Anc113; Anc126; Anc127; Anc80L27; Anc80L59; Anc80L60; Anc80L62; Anc80L65; Anc80L33; Anc80L36; Anc80L44; Anc80L1; Anc110; or Anc80DI.

121. The rAAV of any one of claims 76 to 120 which comprises a VP1, VP2 and/or VP3 capsid protein comprising an amino acid sequence having at least 98% sequence identity to the corresponding protein(s) in AAV2; AAV1; AAV6; AAV3; AAV LK03; AAV7; AAV8; AAV hu.37; AAV rh.10; AAV9; AAV hu.68; AAV10; AAV5; AAV3-3; AAV4-4; AAV1-A; hu.46-A; hu.48-A; hu.44-A; hu.43-A; AAV6-A; hu.34-B; hu.47-B; hu.29-B; rh.63-B; hu.56-B; hu.45-B; rh.57-B; rh.35-B; rh.58-B; rh.28-B; rh.51-B; rh.19-B; rh.49-B; rh.52-B; rh.13-B; AAV2-B; rh.20-B; rh.24-B; rh.64-B; hu.27-B; hu.21-B; hu.22-B; hu.23-B; hu.7-C; hu.61-C; rh.56-C; hu. 9-C; hu.54-C; hu.53-C; hu.60-C; hu.55-C; hu.2-C; hu.1-C; hu.18-C; hu.3-C; hu.25-C; hu.15-C; hu.16-C; hu.11-C; hu.10-C; hu.4-C; rh.54-D; rh.48-D; rh.55-D; rh.62-D; AAV7-D; rh.52-E; rh.51-E; hu.39-E; rh.53-E; hu.37-E; rh.43-E; rh.50-E; rh.49-E; rh.61-E; hu.41-E; rh.64-E; rh74; hu.42-E; rh.57-E; rh.40-E; hu.67-E; hu.17-E; hu.6-E; hu.66-E; rh.38-E; hu.32-F; AAV9/hu; hu.31-F; Anc80; Anc81; Anc82; Anc83; Anc84; Anc94; Anc13; Anc126; Anc127; Anc80L27; Anc80L59; Anc80L60; Anc80L62; Anc80L65; Anc80L33; Anc80L36; Anc80L44; Anc80L1; And 10; or Anc80DI.

122. The rAAV of any one of claims 76 to 121 which comprises a VP1, VP2 and/or VP3 capsid protein comprising an amino acid sequence having at least 99% sequence identity to the corresponding protein(s) in AAV2; AAV1; AAV6; AAV3; AAV LK03; AAV7; AAV8; AAV hu.37; AAV rh.10; AAV9; AAV hu.68; AAV10; AAV5; AAV3-3; AAV4-4; AAV1-A; hu.46-A; hu.48-A; hu.44-A; hu.43-A; AAV6-A; hu.34-B; hu.47-B; hu.29-B; rh.63-B; hu.56-B; hu.45-B; rh.57-B; rh.35-B; rh.58-B; rh.28-B; rh.51-B; rh.19-B; rh.49-B; rh.52-B; rh.13-B; AAV2-B; rh.20-B; rh.24-B; rh.64-B; hu.27-B; hu.21-B; hu.22-B; hu.23-B; hu.7-C; hu.61-C; rh.56-C; hu. 9-C; hu.54-C; hu.53-C; hu.60-C; hu.55-C; hu.2-C; hu.1-C; hu.18-C; hu.3-C; hu.25-C; hu.15-C; hu.16-C; hu.11-C; hu.10-C; hu.4-C; rh.54-D; rh.48-D; rh.55-D; rh.62-D; AAV7-D; rh.52-E; rh.51-E; hu.39-E; rh.53-E; hu.37-E; rh.43-E; rh.50-E; rh.49-E; rh.61-E; hu.41-E; rh.64-E; rh74; hu.42-E; rh.57-E; rh.40-E; hu.67-E; hu.17-E; hu.6-E; hu.66-E; rh.38-E; hu.32-F; AAV9/hu; hu.31-F; Anc80; Anc8l; Anc82; Anc83; Anc84; Anc94; Anc113; Anc126; Anc127; Anc80L27; Anc80L59; Anc80L60; Anc80L62; Anc80L65; Anc80L33; Anc80L36; Anc80L44; Anc80L1; Anc110; or Anc80DI.

123. The rAAV of any one of claims 76 to 122 which comprises a VP1, VP2 and/or VP3 capsid protein comprising an amino acid sequence having 100% sequence identity to the corresponding protein(s) in AAV2; AAV1; AAV6; AAV3; AAV LK03; AAV7; AAV8; AAV hu.37; AAV rh.10; AAV9; AAV hu.68; AAV10; AAV5; AAV3-3; AAV4-4; AAV1-A; hu.46-A; hu.48-A; hu.44-A; hu.43-A; AAV6-A; hu.34-B; hu.47-B; hu.29-B; rh.63-B; hu.56-B; hu.45-B; rh.57-B; rh.35-B; rh.58-B; rh.28-B; rh.51-B; rh.19-B; rh.49-B; rh.52-B; rh.13-B; AAV2-B; rh.20-B; rh.24-B; rh.64-B; hu.27-B; hu.21-B; hu.22-B; hu.23-B; hu.7-C; hu.61-C; rh.56-C; hu. 9-C; hu.54-C; hu.53-C; hu.60-C; hu.55-C; hu.2-C; hu.1-C; hu.18-C; hu.3-C; hu.25-C; hu.15-C; hu.16-C; hu.11-C; hu.10-C; hu.4-C; rh.54-D; rh.48-D; rh.55-D; rh.62-D; AAV7-D; rh.52-E; rh.51-E; hu.39-E; rh.53-E; hu.37-E; rh.43-E; rh.50-E; rh.49-E; rh.61-E; hu.41-E; rh.64-E; rh74; hu.42-E; rh.57-E; rh.40-E; hu.67-E; hu.17-E; hu.6-E; hu.66-E; rh.38-E; hu.32-F; AAV9/hu; hu.31-F; Anc80; Anc81; Anc82; Anc83; Anc84; Anc94; Anc113; Anc126; Anc127; Anc80L27; Anc80L59; Anc80L60; Anc80L62; Anc80L65; Anc80L33; Anc80L36; Anc80L44; Anc80L1; Anc110; or Anc80DI.

124. The rAAV of any one of claims 76 to 123, which comprises a modified AAV capsid protein comprising at least one liver-toggle mutation as compared to a reference capsid protein.

125. The rAAV of claim 124, wherein the reference capsid protein is a VP1, VP2 and/or VP3 protein.

126. The rAAV of claim 124 or claim 125, wherein the reference AAV capsid protein is a capsid protein having any one of SEQ ID NOs: 54-152 or a fragment thereof.

127. The rAAV of any one of claims 124 to 126, wherein the at least one liver-toggle mutation comprises:
a. an alanine (A) or glycine (G) amino acid residue at an amino acid position corresponding to position 266 in Anc80; and/or
b. a lysine (K) or arginine (R) amino acid residue at an amino acid position corresponding to position 168 in Anc80.

128. The rAAV of claim 127, wherein the at least one liver-toggle mutation comprises:
a. an alanine (A) amino acid residue at an amino acid position corresponding to position 266 in Anc80; and/or
b. a lysine (K) amino acid residue at an amino acid position corresponding to position 168 in Anc80.

129. The rAAV of claim 127, wherein the at least one liver-toggle mutation comprises:
a. an alanine (A) amino acid residue at an amino acid position corresponding to position 266 in Anc80; and/or
b. an arginine (R) amino acid residue at an amino acid position corresponding to position 168 in Anc80.

130. The rAAV of claim 127, wherein the at least one liver-toggle mutation comprises:
a. a glycine (G) amino acid residue at an amino acid position corresponding to position 266 in Anc80; and/or
b. a lysine (K) amino acid residue at an amino acid position corresponding to position 168 in Anc80.

131. The rAAV of claim 127, wherein the at least one liver-toggle mutation comprises:
a. a glycine (G) amino acid residue at an amino acid position corresponding to position 266 in Anc80; and/or
b. an arginine (R) amino acid residue at an amino acid position corresponding to position 168 in Anc80.

132. The rAAV of any one of claims 124 to 126, wherein the at least one liver-toggle mutation comprises an alanine (A) at an amino acid position corresponding to position 267 in AAV9.

133. The rAAV of any one of claims 124 to 126, wherein the at least one liver-toggle mutation comprises a threonine (T) at an amino acid position corresponding to position 269 in AAV9.

134. The rAAV of any one of claims 76-133, wherein the capsid protein is a modified AAV9 capsid protein, optionally wherein the capsid protein is a modified AAV9 VP1 capsid protein.

135. The rAAV of any one any one of claims 124 to 126, 132 and 133, wherein the liver-toggle mutation comprises:
a. an alanine (A) amino acid residue at an amino acid position corresponding to position 267 in AAV9; and
b. a threonine (T) amino acid residue at an amino acid position corresponding to position 269 in AAV9.

136. The rAAV of any one any one of claims 124 to 126, 132 and 133, wherein the liver-toggle mutation further comprises
a. an alanine (A) amino acid residue at an amino acid position corresponding to position 504 in AAV9; and/or
b. an Alanine (A) amino acid residue at an amino acid position corresponding to position 505 in AAV9.

137. The rAAV of any one of claims 124 to 136, wherein the liver-toggle mutant comprises the sequence NSTSGASS (SEQ ID NO: 160), NSTSGGST (SEQ ID NO:161) or NSTSGAST (SEQ ID NO: 162).

138. The rAAV of claim 124, wherein the rAAV capsid protein has the sequence of SEQ ID NO 159.

139. The rAAV of claim 124, wherein the rAAV capsid protein has the sequence of SEQ ID NO:163.

140. The rAAV of any one any one of claims 124 to 126, wherein the one or more liver toggle mutations comprise one or more amino acid substitutions at one or more of Q263, S264, G265, A266, S267, N268, H271, N382, G383, S384, Q385, S446, R471, W502, T503, D528, D529, Q589, K706, and V708 as compared to an AAV2 reference capsid protein (SEQ ID NO:1 of WO2021/050614, which is incorporated by reference herein).

141. The rAAV of any one any one of claims 124 to 126 and 140, wherein the one or more liver toggle mutations comprise the amino acid substitution S446R as compared to a reference capsid protein.

142. The rAAV of any one any one of claims 124 to 126, 140 and 141, wherein the one or more liver toggle mutations comprise the amino acid substitution R471A as compared to a reference capsid protein.

143. The rAAV of any one any one of claims 124 to 126 and 140 to 142, wherein the one or more liver toggle mutations comprise the amino acid substitution V708T or V708A as compared to a reference capsid protein.

144. The rAAV of any one of claims 76 to 143, which comprises a modified AAV capsid protein comprising at least one muscle-targeting element as compared to a reference capsid protein.

145. The rAAV of claim 144, wherein the reference capsid protein is a VP1, VP2 and/or VP3 protein.

146. The rAAV of any one of claim 144 or claim 145, wherein the muscle targeting element is 7-mer peptide having the sequence RGDX1X2X3X4 (SEQ ID NO:52), wherein X1 to X4 are independently selected amino acid residues.

147. The rAAV of claim 146, wherein X1, X2, and X3 are independently selected from L, G, V, and A; and X4 is selected from S, V, A, G, and L.

148. The rAAV of any one of claims 146 to 147, wherein X1, X2, and X3 are independently selected from L, V, and A; and at least two of X1, X2, and X3 are independently L.

149. The rAAV of any one of claims 146 to 148, wherein, X2 is L.

150. The rAAV of claim 146, wherein 7-mer peptide has a sequence of RGDLLLS (SEQ ID NO: 1).

151. The rAAV of claim 144 or claim 145, wherein the targeting peptide is the 7-mer peptide TLAVPFK (SEQ ID NO:53).

152. The rAAV of claim 144 or claim 145, wherein the targeting peptide is a peptide having any one of SEQ ID NOs:2-51 and 53.

153. The rAAV of claim 144 or claim 145, wherein the muscle-targeting element consists of a 7-mer peptide having the sequence RGDLLLS (SEQ ID NO:1) inserted into a site within VR VIII of the AAV capsid protein.

154. The rAAV of claim 153, wherein the 7-mer peptide is inserted into an amino acid position between 565 and 595 of the reference AAV capsid protein.

155. The rAAV of any one of claims 144 to 154, wherein:
a. the reference AAV capsid protein is a capsid protein of AAV1 and a 7-mer muscle-targeting peptide is inserted between D590 and P591 or between S588 and T589 of the capsid protein;
b. the reference AAV capsid protein is a capsid protein of AAV2 and the 7-mer muscle-targeting peptide is inserted between R588 and Q589 or between N587 and R588 of the capsid protein;
c. the reference AAV capsid protein is a capsid protein of AAV3b and the 7-mer muscle-targeting peptide is inserted between S586 and S587 or between N588 and T589 of the capsid protein;
d. the reference AAV capsid protein is a capsid protein of AAV4 and the 7-mer muscle-targeting peptide is inserted between S584 and N585 or between S586 and N587 of the capsid protein;
e. the reference AAV capsid protein is a capsid protein of AAV5 and the 7-mer muscle-targeting peptide is inserted between S575 and S576 or between T577 and T578 of the capsid protein;
f. the reference AAV capsid protein is a capsid protein of AAV6 and the 7-mer muscle-targeting peptide is inserted between D590 and P591 or S588 and T589 of the capsid protein;
g. the reference AAV capsid protein is a capsid protein of AAV7 and the 7-mer muscle-targeting peptide is inserted between N589 and T590 of the capsid protein;
h. the reference AAV capsid protein is a capsid protein of AAV8 and the 7-mer muscle-targeting peptide is inserted between N590 and T591 of the capsid protein;
i. the reference AAV capsid protein is a capsid protein of AAV9 and the 7-mer muscle-targeting peptide is inserted between Q588 and A589 of the capsid protein;
j. the reference AAV capsid protein is a capsid protein of AAVrh10 and the 7-mer muscle-targeting peptide is inserted between N590 and A591 of the capsid protein;
k. the reference AAV capsid protein is a capsid protein of AAVpo.1 and the 7-mer muscle-targeting peptide is inserted between N567 and S568 or between N569 and T570 of the capsid protein; or
l. the reference AAV capsid protein is a capsid protein of AAV12 and the 7-mer muscle-targeting peptide is inserted between N592 and A593 or between T594 and T595 of the capsid protein.

156. The rAAV of any one of claims 144 to 155, wherein the muscle targeting peptide is inserted into a site within VR VIII of a liver-toggle mutant capsid, optionally a liver-toggle mutant capsid as described in any one of claims 124 to 137.

157. The rAAV of claim 156, wherein the muscle targeting peptide is inserted into an amino acid position between 565 and 595 of the liver toggle mutant.

158. The rAAV of claim 157, wherein:
a. the reference AAV capsid protein is a capsid protein of AAV1 and the targeting peptide is inserted between D590 and P591 or between S588 and T589 of the liver-toggle mutant;
b. the reference AAV capsid protein is a capsid protein of AAV2 and the targeting peptide is inserted between R588 and Q589 or between N587 and R588 of the liver-toggle mutant;
c. the reference AAV capsid protein is a capsid protein of AAV3b and the targeting peptide is inserted between S586 and S587 or between N588 and T589 of the liver-toggle mutant;
d. the reference AAV capsid protein is a capsid protein of AAV4 and the targeting peptide is inserted between S584 and N585 or between S586 and N587 of the liver-toggle mutant;
e. the reference AAV capsid protein is a capsid protein of AAV5 and the targeting peptide is inserted between S575 and S576 or between T577 and T578 of the liver-toggle mutant;
f. the reference AAV capsid protein is a capsid protein of AAV6 and the targeting peptide is inserted between D590 and P591 or S588 and T589 of the liver-toggle mutant;
g. the reference AAV capsid protein is a capsid protein of AAV7 and the targeting peptide is inserted between N589 and T590 of the liver-toggle mutant;
h. the reference AAV capsid protein is a capsid protein of AAV8 and the targeting peptide is inserted between N590 and T591 of the liver-toggle mutant;
i. the reference AAV capsid protein is a capsid protein of AAV9 and the targeting peptide is inserted between Q588 and A589 of the liver-toggle mutant;
j. the reference AAV capsid protein is a capsid protein of AAVrh10 and the targeting peptide is inserted between N590 and A591 of the liver-toggle mutant;
k. the reference AAV capsid protein is a capsid protein of AAVpo.1 and the targeting peptide is inserted between N567 and S568 or between N569 and T570 of the liver-toggle mutant; or
l. the reference AAV capsid protein is a capsid protein of AAV12 and the targeting peptide is inserted between N592 and A593 or between T594 and T595 of the liver-toggle mutant.

159. The rAAV of claim 144, wherein the capsid protein has the sequence of SEQ ID NO:158.

160. The rAAV claim 144, wherein the rAAV capsid protein has the sequence of SEQ H) NO:159.

161. The rAAV of any one of claims 124 to 160, except when dependent on claims 77 to 115, in which the ERE comprises a constitutive promoter.

162. The rAAV of claim 161, wherein the constitutive promoter is the Rous sarcoma virus (RSV) LTR promoter (optionally with the RSV enhancer), the cytomegalovirus (CMV) promoter (optionally with the CMV enhancer), the SV40 promoter, the dihydrofolate reductase (DHFR) promoter, the β-actin promoter, the phosphoglycerol kinase 1 (PGK1) promoter (optionally the minimal PGK1 promoter), or the EF1 alpha promoter (optionally with intron).

163. The rAAV of any one of claims 124 to 160, except when dependent on claims 77 to 115, in which the ERE comprises an inducible promoter.

164. The rAAV of claim 163, wherein the inducible promoter is a tetracycline or rapamycin inducible promoter.

165. The rAAV of any one of claims 124 to 160, except when dependent on claims 77 to 115, in which the ERE comprises a muscle-specific promoter.

166. The rAAV of claim 165, wherein the muscle specific promoter is a desmin promoter (which is optionally a CpG depleted desmin promoter), a CKM promoter derivative or an MTM1 promoter.

167. The rAAV of any one of claims 161 to 166, where the promoter is a human promoter.

168. The rAAV of any one of claims 1 to 167 which comprises a rabbit globin poly A sequence 3′ to the MTM1 coding sequence, optionally wherein the rabbit globin poly A sequence has at least 90% sequence identity to SEQ ID NO:177.

169. The rAAV claim 168, wherein the rabbit globin poly A sequence has at least 95% sequence identity to SEQ ID NO:177.

170. The rAAV claim 169, wherein the rabbit globin poly A sequence has at least 98% sequence identity to SEQ ID NO: 177.

171. The rAAV claim 170, wherein the rabbit globin poly A sequence has at least 99% sequence identity to SEQ ID NO: 177.

172. The rAAV claim 171, wherein the rabbit globin poly A sequence has 100% sequence identity to SEQ ID NO:177.

173. The rAAV of any one of claims 1 to 172 whose genome comprises AAV-derived inverted terminal repeat sequences (ITRs).

174. The rAAV of claim 173, wherein the ITRs are derived from AAV serotype 2.

175. The rAAV of claim 173 or claim 174, which comprises a first ITR having at least 90% sequence identity to SEQ ID NO:178 and a second ITR having at least 90% sequence identity to SEQ ID NO: 179.

176. The rAAV of claim 175, wherein the first ITR has at least 95% sequence identity to SEQ ID NO: 178 and the second ITR has at least 95% sequence identity to SEQ ID NO:179.

177. The rAAV of claim 176, wherein the first ITR has at least 98% sequence identity to SEQ ID NO:178 and the second ITR has at least 98% sequence identity to SEQ ID NO:179.

178. The rAAV of claim 177, wherein the first ITR has at least 99% sequence identity to SEQ ID NO: 178 and the second ITR has at least 99% sequence identity to SEQ ID NO:179.

179. The rAAV of claim 178, wherein the first ITR 100% sequence identity to SEQ ID NO: 178 and the second ITR has 100% sequence identity to SEQ ID NO:179.

180. The rAAV of any one of claims 1 to 179, which comprises a heterologous splice acceptor sequence 5′ to the MTM1 coding sequence.

181. The rAAV of claim 180, wherein the heterologous splice acceptor sequence is derived from human beta globin exon 3.

182. The rAAV of claim 181, wherein the heterologous splice acceptor sequence comprises the nucleotide sequence of 180.

183. An rAAV comprising:
a. modified AAV capsid protein comprising at least one liver-toggle mutation and/or one muscle-targeting element, optionally wherein the modified capsid protein comprises the amino acid sequence of SEQ ID NO:158, SEQ ID NO:159, or SEQ ID NO:163;
b. a genome comprising:
i. a first ITR sequence;
ii. a hybrid expression regulatory element (ERE) comprising a CMV enhancer and a chicken beta actin promoter, optionally wherein the ERE comprises the nucleotide sequence of SEQ ID NO:173;
iii. an MTM1 coding sequence operably linked to the ERE; and
iv. a second ITR sequence.

184. The rAAV of claim 183, which further comprises a chimeric intron between the ERE and the MTM1 coding sequence, optionally wherein the chimeric intron comprises the nucleotide sequence of SEQ ID NO:176.

185. The rAAV of claim 183 or claim 184, which further comprises a splice acceptor site 5′ to the MTM1 coding sequence, optionally wherein the splice acceptor site comprises the nucleotide sequence of SEQ ID NO:180.

186. The rAAV of any one of claims 183 to 185, which further comprises a polyadenylation sequence 3′ to the MTM1 coding sequence, optionally wherein the polyadenylation sequence comprises the nucleotide sequence of SEQ ID NO:177.

187. The rAAV of any one of claims 183 to 186, wherein the MTM1 coding sequence is codon optimized for expression in human cells, optionally wherein the MTM1 coding sequence comprises the nucleotide sequence of SEQ ID NO: 167, SEQ ID NO:168, SEQ ID NO:169 or SEQ ID NO:170.

188. The rAAV of any one of claims 1 to 187 whose genome is self-complementary, optionally wherein the genome is fully self-complementary.

189. A pharmaceutical composition comprising the rAAV of any one of claims 1 to 188 and a pharmaceutically acceptable carrier.

190. The pharmaceutical composition of claim 189 which is in the form of a unit dose.

191. The pharmaceutical composition of claim 189 or claim 190 which comprises 1×10¹⁰ to 1×10¹⁶ genome copy numbers (GC) of the rAAV and/or in which the rAAV concentration is 1×10¹⁰ vg/ml to 1×10¹⁶ vg/ml.

192. The pharmaceutical composition of any one of claims 189 to 191 which is formulated for parenteral administration, for example systemic (e.g., intravenous), intramuscular or subcutaneous administration.

193. A host cell engineered to produce the rAAV of any one of claims 1 to 188.

194. The host cell of claim 193, which comprises a polynucleotide expressing one or more capsid proteins of the rAAV, a functional rep gene, and a recombinant nucleic acid vector comprising AAV ITRs and the MTM coding sequence operably linked to an expression regulatory element (ERE), optionally wherein the ERE is a hybrid ERE comprising a CMV enhancer and a chicken beta actin promoter.

195. A method for treating or ameliorating or preventing X-linked myotubular myopathy in a subject, comprising administering a therapeutically effective amount of the rAAV of any one of claims 1 to 188 or the pharmaceutical composition of any one of claims 189 to 192.

196. The method of claim 195, wherein the effective dose comprises 1×10¹⁰ to 1×10¹⁶ genome copy numbers (GC) of the rAAV.

197. The method of claim 195 or claim 196, wherein the effective dose is 1×10¹⁵ GC or less.

198. The method of claim 195 or claim 196, wherein the effective dose is 5×10¹⁴ GC or less.

199. The method of claim 195 or claim 196, wherein the effective dose is 1×10¹⁴ GC or less.

200. The method of claim 195 or claim 196, wherein the effective dose is 5×10¹³ GC or less.

201. The method of claim 195 or claim 196, wherein the effective dose is 1×10¹³ CC or less.

202. The method of any one of claims 195 to 201, wherein the administration is parenteral.

203. The method of claim 202, wherein the administration is systemic (e.g., intravenous).

204. The method of claim 202, wherein the administration is intramuscular.

205. The method of claim 202, wherein the administration is subcutaneous.

206. The rAAV of any one of claims 1 to 188 or the pharmaceutical composition of any one of claims 189 to 192, for use in treating and/or preventing X-linked myotubular myopathy.

207. The rAAV of any one of claims 1 to 188 or the pharmaceutical composition of any one of claims 189 to 192, for use in expressing myotubularin in a muscle cell.
